(19) United States
(12) Patent Application Publication
(10) Pub. No.: US 2004/0110939 A1
(43) Pub. Date: Jun. 10, 2004

(54) Complementary DNAs encoding proteins with signal peptides

(75) Inventors: Jean-Baptiste Dumas Milne Edwards, Paris (FR); Lydie Bougueleret, Petit Lancy (CH); Severin Jobert, Paris (FR); Catherine Clusel, Vincennes (FR); Aymeric Duclert, Saint-Maur (FR)

Correspondence Address: SALIWANCHIK LLOYD & SALIWANCHIK, A PROFESSIONAL ASSOCIATION, 2421 N.W. 41ST STREET, SUITE A-1, GAINESVILLE, FL, 326066669

(73) Assignee: GENSET, S.A., Paris (FR)

(21) Appl. No.: 09/978,360

(22) Filed: Oct. 15, 2001

Related U.S. Application Data
(63) Continuation-in-part of application No. 09/663,600, filed on Sep. 15, 2000, now Pat. No. 6,573,068.

(30) Foreign Application Priority Data
Dec. 17, 1998 (WO) PCT/IB98/02122
Feb. 9, 1999 (WO) PCT/IB99/00282
Jun. 21, 2000 (WO) PCT/IB00/00951

(51) Int. Cl. C12Q 1/68; C07H 21/04; C07K 14/47

(52) U.S. Cl. 536/23.5; 435/6; 435/320.1; 435/325; 530/350; 530/388.1

(57) ABSTRACT

The sequences of cDNAs encoding secreted proteins are disclosed. The cDNAs can be used to express secreted proteins or fragments thereof or to obtain antibodies capable of specifically binding to the secreted proteins. The cDNAs may also be used in diagnostic, forensic, gene therapy, and chromosome mapping procedures. The cDNAs may also be used to design expression vectors and secretion vectors.

### RELATED U.S. APPLICATION DATA

[0001] The present application is a continuation-in-part of:

[0002] U.S. CIP application Ser. No. 09/663,600, filed Sep. 15, 2000, and claims priority from U.S. application Ser. No. 09/191,997, filed Nov. 13, 1998; U.S. Provisional Application Serial No. 60/066,677, filed Nov. 13, 1997; U.S. Provisional Application Serial No. 60/069,957, filed Dec. 17, 1997; U.S. Provisional Application Serial No. 60/074,121, filed Feb. 9, 1998; U.S. Provisional Application Serial No. 60/081,563, filed Apr. 13, 1998; U.S. Provisional Application Serial No. 60/096,116, filed Aug. 10, 1998, and U.S. Provisional Application Serial No. 60/099,273, filed Sep. 4, 1998, the entireties of which are hereby incorporated by reference;

[0003] U.S. patent application Ser. No. 09/215,435 and PCT Application PCT/IB98/02122, filed Dec. 17, 1998, and claims priority from U.S. Provisional Patent Application Serial No. 60/069,957, filed Dec. 17, 1997; U.S. Provisional Patent Application Serial No. 60/074,121, filed Feb. 9, 1998; U.S. Provisional Patent Application Serial No. 60/081,563, filed Apr. 13, 1998; U.S. Provisional Patent Application Serial No. 60/096,116, filed Aug. 10, 1998; and U.S. Provisional Patent Application Serial No. 60/099,273, filed Sep. 4, 1998, the disclosures of which are incorporated herein by reference in their entirety;

[0004] U.S. patent application Ser. No. 09/247,155 and PCT Application PCT/IB99/00282 filed Feb. 9, 1999, and claims priority from U.S. Provisional Patent Application Serial No. 60/074,121, filed Feb. 9, 1998; U.S. Provisional Patent Application Serial No. 60/081,563, filed Apr. 13, 1998; U.S. Provisional Patent Application Serial No. 60/096,116, filed Aug. 10, 1998; and U.S. Provisional Patent Application Serial No. 60/099,273, filed Sep. 4, 1998, the disclosures of which are incorporated herein by reference in their entirety; and

[0005] U.S. CIP application Ser. No. 09/599,360 and PCT Application PCT/1B00/00951 filed Jun. 21, 2000, and claims priority from U.S. application Ser. No. 09/469,099, filed Dec. 21, 1999; U.S. Provisional Patent Application Serial No. 60/113,686, filed Dec. 22, 1998; and U.S. Provisional Patent Application Serial No. 60/141,032, filed Jun. 25, 1999, the disclosures of which are incorporated herein by reference in their entireties.

### BACKGROUND OF THE INVENTION

[0006] The estimated 50,000-100,000 genes scattered along the human chromosomes offer tremendous promise for the understanding, diagnosis, and treatment of human diseases. In addition, probes capable of specifically hybridizing to loci distributed throughout the human genome find applications in the construction of high resolution chromosome maps and in the identification of individuals.

[0007] In the past, the characterization of even a single human gene was a painstaking process, requiring years of effort. Recent developments in the areas of cloning vectors, DNA sequencing, and computer technology have merged to greatly accelerate the rate at which human genes can be isolated, sequenced, mapped, and characterized.

[0008] Currently, two different approaches are being pursued for identifying and characterizing the genes distributed along the human genome. In one approach, large fragments of genomic DNA are isolated, cloned, and sequenced. Potential open reading frames in these genomic sequences are identified using bio-informatics software. However, this approach entails sequencing large stretches of human DNA which do not encode proteins in order to find the protein encoding sequences scattered throughout the genome. In addition to requiring extensive sequencing, the bio-informatics software may mischaracterize the genomic sequences obtained, i.e., labeling non-coding DNA as coding DNA and vice versa.

[0009] An alternative approach takes a more direct route to identifying and characterizing human genes. In this approach, complementary DNAs (cDNAs) are synthesized from isolated messenger RNAs (mRNAs) which encode human proteins. Using this approach, sequencing is only performed on DNA which is derived from protein coding fragments of the genome. Often, only short stretches of the cDNAs are sequenced to obtain sequences called expressed sequence tags (ESTs). The ESTs may then be used to isolate or purify cDNAs which include sequences adjacent to the EST sequences. The cDNAs may contain all of the sequence of the EST which was used to obtain them or only a fragment of the sequence of the EST which was used to obtain them. In addition, the cDNAs may contain the full coding sequence of the gene from which the EST was derived or, alternatively, the cDNAs may include fragments of the coding sequence of the gene from which the EST was derived. It will be appreciated that there may be several cDNAs which include the EST sequence as a result of alternate splicing or the activity of alternative promoters.

[0010] In the past, these short EST sequences were often obtained from oligo-dT primed cDNA libraries. Accordingly, they mainly corresponded to the 3′ untranslated region of the mRNA. In part, the prevalence of EST sequences derived from the 3′ end of the mRNA is a result of the fact that typical techniques for obtaining cDNAs, are not well suited for isolating cDNA sequences derived from the 5′ ends of mRNAs (Adams et al., Nature 377:3-174, 1996, Hillier et al., Genome Res. 6:807-828, 1996). In addition, in those reported instances where longer cDNA sequences have been obtained, the reported sequences typically correspond to coding sequences and do not include the full 5′ untranslated region (5′UTR) of the mRNA from which the cDNA is derived. Indeed, 5′UTRs have been shown to affect either the stability or translation of mRNAs. Thus, regulation of gene expression may be achieved through the use of alternative 5′UTRs as shown, for instance, for the translation of the tissue inhibitor of metalloprotease mRNA in mitogenically activated cells (Waterhouse et al., J Biol. Chem. 265:5585-9. 1990). Furthermore, modification of 5′UTR through mutation, insertion or translocation events may even be implied in pathogenesis. For instance, the fragile X syndrome, the most common cause of inherited mental retardation, is partly due to an insertion of multiple CGG trinucleotides in the 5′UTR of the fragile X mRNA resulting in the inhibition of protein synthesis via ribosome stalling (Feng et al., Science 268:731-4, 1995). An aberrant mutation in regions of the 5′UTR known to inhibit translation of the proto-oncogene c-myc was shown to result in upregulation of c-myc protein levels in cells derived from patients with multiple myelomas (Willis et al., Curr Top Microbiol Immunol 224:269-76, 1997). In addition, the use of oligo-dT primed cDNA libraries does not allow the isolation of complete 5′UTRs since such incomplete sequences obtained by this process may not include the first exon of the mRNA, particularly in situations where the first exon is short. Furthermore, they may not include some exons, often short ones, which are located upstream of splicing sites. Thus, there is a need to obtain sequences derived from the 5′ ends of mRNAs.

[0011] Moreover, despite the great amount of EST data that large-scale sequencing projects have yielded (Adams et al., Nature 377:174, 1996, Hillier et al., Genome Res. 6:807-828, 1996), information concerning the biological function of the mRNAs corresponding to such obtained cDNAs has revealed to be limited. Indeed, whereas the knowledge of the complete coding sequence is absolutely necessary to investigate the biological function of mRNAs, ESTs yield only partial coding sequences. So far, large-scale full-length cDNA cloning has been achieved only with limited success because of the poor efficiency of methods for constructing full-length cDNA libraries. Indeed, such methods require either a large amount of mRNA (Ederly et al., 1995), thus resulting in non representative full-length libraries when small amounts of tissue are available or require PCR amplification (Maruyama et al., 1994; CLONTECHniques, 1996) to obtain a reasonable number of clones, thus yielding strongly biased cDNA libraries where rare and long cDNAs are lost. Thus, there is a need to obtain full-length cDNAs, i.e. cDNAs containing the full coding sequence of their corresponding mRNAs.

[0012] While many sequences derived from human chromosomes have practical applications, approaches based on the identification and characterization of those chromosomal sequences which encode a protein product are particularly relevant to diagnostic and therapeutic uses. Of the 50,000-100,000 protein coding genes, those genes encoding proteins which are secreted from the cell in which they are synthesized, as well as the secreted proteins themselves, are particularly valuable as potential therapeutic agents. Such proteins are often involved in cell to cell communication and may be responsible for producing a clinically relevant response in their target cells. In fact, several secretory proteins, including tissue plasminogen activator, G-CSF, GM-CSF, erythropoietin, human growth hormone, insulin, interferon-α, interferon-β, interferon-γ, and interleukin-2, are currently in clinical use. These proteins are used to treat a wide range of conditions, including acute myocardial infarction, acute ischemic stroke, anemia, diabetes, growth hormone deficiency, hepatitis, kidney carcinoma, chemotherapy induced neutropenia and multiple sclerosis. For these reasons, cDNAs encoding secreted proteins or fragments thereof represent a particularly valuable source of therapeutic agents. Thus, there is a need for the identification and characterization of secreted proteins and the nucleic acids encoding them.

[0013] In addition to being therapeutically useful themselves, secretory proteins include short peptides, called signal peptides, at their amino termini which direct their secretion. These signal peptides are encoded by the signal sequences located at the 5′ ends of the coding sequences of genes encoding secreted proteins. Because these signal peptides will direct the extracellular secretion of any protein to which they are operably linked, the signal sequences may be exploited to direct the efficient secretion of any protein by operably linking the signal sequences to a gene encoding the protein for which secretion is desired. In addition, fragments of the signal peptides called membrane-translocating sequences, may also be used to direct the intracellular import of a peptide or protein of interest. This may prove beneficial in gene therapy strategies in which it is desired to deliver a particular gene product to cells other than the cells in which it is produced. Signal sequences encoding signal peptides also find application in simplifying protein purification techniques. In such applications, the extracellular secretion of the desired protein greatly facilitates purification by reducing the number of undesired proteins from which the desired protein must be selected. Thus, there exists a need to identify and characterize the 5′ fragments of the genes for secretory proteins which encode signal peptides.

[0014] Sequences coding for secreted proteins may also find application as therapeutics or diagnostics. In particular, such sequences may be used to determine whether an individual is likely to express a detectable phenotype, such as a disease, as a consequence of a mutation in the coding sequence for a secreted protein. In instances where the individual is at risk of suffering from a disease or other undesirable phenotype as a result of a mutation in such a coding sequence, the undesirable phenotype may be corrected by introducing a normal coding sequence using gene therapy. Alternatively, if the undesirable phenotype results from overexpression of the protein encoded by the coding sequence, expression of the protein may be reduced using antisense or triple helix based strategies.

[0015] The secreted human polypeptides encoded by the coding sequences may also be used as therapeutics by administering them directly to an individual having a condition, such as a disease, resulting from a mutation in the sequence encoding the polypeptide. In such an instance, the condition can be cured or ameliorated by administering the polypeptide to the individual.

[0016] In addition, the secreted human polypeptides or fragments thereof may be used to generate antibodies useful in determining the tissue type or species of origin of a biological sample. The antibodies may also be used to determine the cellular localization of the secreted human polypeptides or the cellular localization of polypeptides which have been fused to the human polypeptides. In addition, the antibodies may also be used in immunoaffinity chromatography techniques to isolate, purify, or enrich the human polypeptide or a target polypeptide which has been fused to the human polypeptide.

[0017] Public information on the number of human genes for which the promoters and upstream regulatory regions have been identified and characterized is quite limited. In part, this may be due to the difficulty of isolating such regulatory sequences. Upstream regulatory sequences such as transcription factor binding sites are typically too short to be utilized as probes for isolating promoters from human genomic libraries. Recently, some approaches have been developed to isolate human promoters. One of them consists of making a CpG island library (Cross et al., Nature Genetics 6: 236-244, 1994). The second consists of isolating human genomic DNA sequences containing SpeI binding sites by the use of SpeI binding protein. (Mortlock et al., Genome Res. 6:327-335, 1996). Both of these approaches have their limits due to a lack of specificity and of comprehensiveness. Thus, there exists a need to identify and systematically characterize the 5′ fragments of the genes.

[0018] cDNAs including the 5′ ends of their corresponding mRNA may be used to efficiently identify and isolate 5′UTRs and upstream regulatory regions which control the location, developmental stage, rate, and quantity of protein synthesis, as well as the stability of the mRNA (Theil et al., BioFactors 4:87-93, (1993). Once identified and characterized, these regulatory regions may be utilized in gene therapy or protein purification schemes to obtain the desired amount and locations of protein synthesis or to inhibit, reduce, or prevent the synthesis of undesirable gene products.

[0019] In addition, cDNAs containing the 5′ ends of secretory protein genes may include sequences useful as probes for chromosome mapping and the identification of individuals. Thus, there is a need to identify and characterize the sequences upstream of the 5′ coding sequences of genes encoding secretory proteins.

### SUMMARY OF THE INVENTION

[0020] The present invention relates to purified, isolated, or recombinant cDNAs which encode secreted proteins or fragments thereof. Preferably, the purified, isolated or recombinant cDNAs contain the entire open reading frame of their corresponding mRNAs, including a start codon and a stop codon. For example, the cDNAs may include nucleic acids encoding the signal peptide as well as the mature protein. Such cDNAs will be referred herein as “full-length” cDNAs. Alternatively, the cDNAs may contain a fragment of the open reading frame. Such cDNAs will be referred herein as “ESTs” or “5′ESTs”. In some embodiments, the fragment may encode only the sequence of the mature protein. Alternatively, the fragment may encode only a fragment of the mature protein. A further aspect of the present invention is a nucleic acid which encodes the signal peptide of a secreted protein.

[0021] The term “corresponding mRNA” refers to the mRNA which was the template for the cDNA synthesis which produced the cDNA of the present invention.

[0022] As used herein, the term “purified” does not require absolute purity; rather, it is intended as a relative definition. Purification of starting material or natural material is at least one order of magnitude, preferably two or three orders, and more preferably four or five orders of magnitude is expressly contemplated. As an example, purification from 0.1% concentration to 10% concentration is two orders of magnitude.

[0023] To illustrate, individual cDNA clones isolated from a cDNA library have been conventionally purified to electrophoretic homogeneity. The sequences obtained from these clones could not be obtained directly either from the library or from total human DNA. The cDNA clones are not naturally occurring as such, but rather are obtained via manipulation of a partially purified naturally occurring substance (messenger RNA). The conversion of mRNA into a cDNA library involves the creation of a synthetic substance (cDNA) and pure individual cDNA clones can be isolated from the synthetic library by clonal selection. Thus, creating a cDNA library from messenger RNA and subsequently isolating individual clones from that library results in an approximately 10⁴-10⁶ fold purification of the native message.

[0024] The term “purified” is further used herein to describe a polypeptide or polynucleotide of the invention which has been separated from other compounds including, but not limited to, polypeptides or polynucleotides, carbohydrates, lipids, etc. The term “purified” may be used to specify the separation of monomeric polypeptides of the invention from oligomeric forms such as homo- or hetero-dimers, trimers, etc. The term “purified” may also be used to specify the separation of covalently closed polynucleotides from linear polynucleotides. A polynucleotide is substantially pure when at least about 50%, preferably 60 to 75% of a sample exhibits a single polynucleotide sequence and conformation (linear versus covalently close). A substantially pure polypeptide or polynucleotide typically comprises about 50%, preferably 60 to 90% weight/weight of a polypeptide or polynucleotide sample, respectively, more usually about 95%, and preferably is over about 99% pure. Polypeptide and polynucleotide purity, or homogeneity, is indicated by a number of means well known in the art, such as agarose or polyacrylamide gel electrophoresis of a sample, followed by visualizing a single band upon staining the gel. For certain purposes higher resolution can be provided by using HPLC or other means well known in the art. As an alternative embodiment, purification of the polypeptides and polynucleotides of the present invention may be expressed as “at least” a percent purity relative to heterologous polypeptides and polynucleotides (DNA, RNA or both). As a preferred embodiment, the polypeptides and polynucleotides of the present invention are at least; 10%, 20%, 30%, 40%, 50%, 60%, 70%, 80%, 90%, 95%, 96%, 96%, 98%, 99%, or 100% pure relative to heterologous polypeptides and polynucleotides, respectively. As a further preferred embodiment the polypeptides and polynucleotides have a purity ranging from any number, to the thousandth position, between 90% and 100% (e.g., a polypeptide or polynucleotide at least 99.995% pure) relative to either heterologous polypeptides or polynucleotides, respectively, or as a weight/weight ratio relative to all compounds and molecules other than those existing in the carrier. Each number representing a percent purity, to the thousandth position, may be claimed as individual species of purity.

[0025] As used herein, the term “recombinant polynucleotide” means that the cDNA is adjacent to “backbone” nucleic acid to which it is not adjacent in its natural environment. Additionally, to be “enriched” the cDNAs will represent 5% or more of the number of nucleic acid inserts in a population of nucleic acid backbone molecules. Backbone molecules according to the present invention include nucleic acids such as expression vectors, self-replicating nucleic acids, viruses, integrating nucleic acids, and other vectors or nucleic acids used to maintain or manipulate a nucleic acid insert of interest. Preferably, the enriched cDNAs represent 15% or more of the number of nucleic acid inserts in the population of recombinant backbone molecules. More preferably, the enriched cDNAs represent 50% or more of the number of nucleic acid inserts in the population of recombinant backbone molecules. In a highly preferred embodiment, the enriched cDNAs represent 90% or more (including any number between 90 and 100%, to the thousandth position, e.g., 99.5%) of the number of nucleic acid inserts in the population of recombinant backbone molecules.

[0026] Unless otherwise specified, nucleotides and amino acids of polynucleotide and polypeptide fragments (respectively) of the present invention are contiguous and not interrupted by heterologous sequences.

[0027] The term “isolated” requires that the material be removed from its original environment (e.g., the natural environment if it is naturally occurring). For example, a naturally occurring polynucleotide or polypeptide present in a living animal is not isolated, but the same polynucleotide or DNA or polypeptide, separated from some or all of the coexisting materials in the natural system, is isolated. Such polynucleotide could be part of a vector and/or such polynucleotide or polypeptide could be part of a composition, and still be isolated in that the vector or composition is not part of its natural environment. Specifically excluded from the definition of “isolated” are: naturally occurring chromosomes (such as chromosome spreads), artificial chromosome libraries, genomic libraries, and cDNA libraries that exist either as an in vitro nucleic acid preparation or as a transfected/transformed host cell preparation, wherein the host cells are either an in vitro heterogeneous preparation or plated as a heterogeneous population of single colonies, and/or further wherein the polynucleotide of the present invention makes up less than 5% (or alternatively 1%, 2%, 3%, 4%, 10%, 25%, 50%, 75%, or 90%, 95%, or 99%) of the number of nucleic acid inserts in the vector molecules. Further specifically excluded are whole cell genomic DNA or whole cell RNA preparations (including said whole cell preparations which are mechanically sheared or enzymaticly digested). Further specifically excluded are the above whole cell preparations as either an in vitro preparation or as a heterogeneous mixture separated by electrophoresis (including blot transfers of the same) wherein the polynucleotide of the invention have not been further separated from the heterologous polynucleotides in the electrophoresis medium (e.g., further separating by excising a single band from a heterogeneous band population in an agarose gel or nylon blot).

[0028] Thus, cDNAs encoding secreted polypeptides or fragments thereof which are present in cDNA libraries in which one or more cDNAs encoding secreted polypeptides or fragments thereof make up 5% or more of the number of nucleic acid inserts in the backbone molecules are “enriched recombinant cDNAs” as defined herein. Likewise, cDNAs encoding secreted polypeptides or fragments thereof which are in a population of plasmids in which one or more cDNAs of the present invention have been inserted such that they represent 5% or more of the number of inserts in the plasmid backbone are “enriched recombinant cDNAs” as defined herein. However, cDNAs encoding secreted polypeptides or fragments thereof which are in cDNA libraries in which the cDNAs encoding secreted polypeptides or fragments thereof constitute less than 5% of the number of nucleic acid inserts in the population of backbone molecules, such as libraries in which backbone molecules having a cDNA insert encoding a secreted polypeptide are extremely rare, are not “enriched recombinant cDNAs.”

[0029] The term “polypetide” refers to a polymer of amino acids without regard to the length of the polymer; thus, “peptides,” “oligopeptides”, and “proteins” are included within the definition of polypeptide and used interchangeably herein. This term also does not specify or exclude chemical or post-expression modifications of the polypeptides of the invention, although chemical or post-expression modifications of these polypeptides may be included or excluded as specific embodiments. Therefore, for example, modifications to polypeptides that include the covalent attachment of glycosyl groups, acetyl groups, phosphate groups, lipid groups and the like are expressly encompassed by the term polypeptide. Further, polypeptides with these modifications may be specified as individual species to be included or excluded from the present invention. The natural or other chemical modifications, such as those listed in examples above can occur anywhere in a polypeptide, including the peptide backbone, the amino acid side-chains and the amino or carboxyl termini. It will be appreciated that the same type of modification may be present in the same or varying degrees at several sites in a given polypeptide. Also, a given polypeptide may contain many types of modifications. Polypeptides may be branched, for example, as a result of ubiquitination, and they may be cyclic, with or without branching. Modifications include acetylation, acylation, ADP-ribosylation, amidation, covalent attachment of flavin, covalent attachment of a heme moiety, covalent attachment of a nucleotide or nucleotide derivative, covalent attachment of a lipid or lipid derivative, covalent attachment of phosphotidylinositol, cross-linking, cyclization, disulfide bond formation, demethylation, formation of covalent cross-links, formation of cysteine, formation of pyroglutamate, formylation, gamma-carboxylation, glycosylation, GPI anchor formation, hydroxylation, iodination, methylation, myristoylation, oxidation, pegylation, proteolytic processing, phosphorylation, prenylation, racemization, selenoylation, sulfation, transfer-RNA mediated addition of amino acids to proteins such as arginylation, and ubiquitination. (See, for instance, PROTEINS—STRUCTURE AND MOLECULAR PROPERTIES, 2nd Ed., T. E. Creighton, W. H. Freeman and Company, New York (1993); POSTTRANSLATIONAL COVALENT MODIFICATION OF PROTEINS, B. C. Johnson, Ed., Academic Press, New York, pgs. 1-12, 1983; Seifter et al., Meth Enzymol 182:626-646, 1990; Rattan et al., Ann NY Acad Sci 663:48-62, 1992). Also included within the definition are polypeptides which contain one or more analogs of an amino acid (including, for example, non-naturally occurring amino acids, amino acids which only occur naturally in an unrelated biological system, modified amino acids from mammalian systems etc.), polypeptides with substituted linkages, as well as other modifications known in the art, both naturally occurring and non-naturally occurring. The term “polypeptide” may also be used interchangeably with the term “protein”.

[0030] As used interchangeably herein, the terms “nucleic acid molecule”, “oligonucleotides”, and “polynucleotides” include RNA or, DNA (either single or double stranded, coding, non-coding, complementary or antisense), or RNA/DNA hybrid sequences of more than one nucleotide in either single chain or duplex form (although each of the above species may be particularly specified). The term “nucleotide” as used herein as an adjective to describe molecules comprising RNA, DNA, or RNA/DNA hybrid sequences of any length in single-stranded or duplex form. The term “nucleotide” is also used herein as a noun to refer to individual nucleotides or varieties of nucleotides, meaning a molecule, or individual unit in a larger nucleic acid molecule, comprising a purine or pyrimidine, a ribose or deoxyribose sugar moiety, and a phosphate group, or phosphodiester linkage in the case of nucleotides within an oligonucleotide or polynucleotide. The term “nucleotide” is also used herein to encompass “modified nucleotides” which comprise at least one modifications (a) an alternative linking group, (b) an analogous form of purine, (c) an analogous form of pyrimidine, or (d) an analogous sugar; for examples of analogous linking groups, purine, pyrimidines, and sugars see for example PCT publication No. WO 95/04064. Preferred modifications of the present invention include, but are not limited to, 5-fluorouracil, 5-bromouracil, 5-chlorouracil, 5-iodouracil, hypoxanthine, xantine, 4-acetylcytosine, 5-(carboxyhydroxylmethyl) uracil, 5-carboxymethylaminomethyl-2-thiouridine, 5-carboxymethylaminomethyluracil, dihydrouracil, beta-D-galactosylqueosine, inosine, N6-isopentenyladenine, 1-methylguanine, 1-methylinosine, 2,2-dimethylguanine, 2-methyladenine, 2-methylguanine, 3-methylcytosine, 5-methylcytosine, N6-adenine, 7-methylguanine, 5-methylaminomethyluracil, 5-methoxyaminomethyl-2-thiouracil, beta-D-mannosylqueosine, 5′-methoxycarboxymethyluracil, 5-methoxyuracil, 2-methylthio-N-6-isopentenyladenine, uracil-5-oxyacetic acid (v) ybutoxosine, pseudouracil, queosine, 2-thiocytosine, 5-methyl-2-thiouracil, 2-thiouracil, 4-thiouracil, 5-methyluracil, uracil-5-oxyacetic acid methylester, uracil-5-oxyacetic acid, 5-methyl-2-thiouracil, 3-(3-amino-3-N-2-carboxypropyl) uracil, and 2,6-diaminopurine. Methylenemethylimino linked oligonucleosides as well as mixed backbone compounds having, may be prepared as described in U.S. Pat. Nos. 5,378,825; 5,386,023; 5,489,677; 5,602,240; and 5,610,289. Formacetal and thioformacetal linked oligonucleosides may be prepared as described in U.S. Pat. Nos. 5,264,562 and 5,264,564. Ethylene oxide linked oligonucleosides may be prepared as described in U.S. Pat. No. 5,223,618. Phosphinate oligonucleotides may be prepared as described in U.S. Pat. No. 5,508,270. Alkyl phosphonate oligonucleotides may be prepared as described in U.S. Pat. No. 4,469,863. 3′-Deoxy-3′-methylene phosphonate oligonucleotides may be prepared as described in U.S. Pat. Nos. 5,610,289 or 5,625,050. Phosphoramidite oligonucleotides may be prepared as described in U.S. Pat. No. 5,256,775 or U.S. Pat. No. 5,366,878. Alkylphosphonothioate oligonucleotides may be prepared as described in published PCT applications WO 94/17093 and WO 94/02499. 3′-Deoxy-3′-amino phosphoramidate oligonucleotides may be prepared as described in U.S. Pat. No. 5,476,925. Phosphotriester oligonucleotides may be prepared as described in U.S. Pat. No. 5,023,243. Borano phosphate oligonucleotides may be prepared as described in U.S. Pat. Nos. 5,130,302 and 5,177,198.

[0031] In specific embodiments, the polynucleotides of the invention are at least 15, at least 30, at least 50, at least 100, at least 125, at least 500, or at least 1000 continuous nucleotides but are less than or equal to 300 kb, 200 kb, 100 kb, 50 kb, 10 kb, 7.5 kb, 5 kb, 2.5 kb, 2 kb, 1.5 kb, or 1 kb in length. In a further embodiment, polynucleotides of the invention comprise a portion of the coding sequences, as disclosed herein, but do not comprise all or a portion of any intron. In another embodiment, the polynucleotides comprising coding sequences do not contain coding sequences of a genomic flanking gene (i.e., 5′ or 3′ to the gene of interest in the genome). In other embodiments, the polynucleotides of the invention do not contain the coding sequence of more than 1000, 500, 250, 100, 75, 50, 25, 20, 15, 10, 5, 4, 3, 2, or 1 genomic flanking gene(s).

[0032] The polynucleotide sequences of the invention may be prepared by any known method, including synthetic, recombinant, ex vivo generation, or a combination thereof, as well as utilizing any purification methods known in the art.

[0033] The terms “comprising”, “consisting of” and “consisting essentially of” may be interchanged for one another throughout the instant application”. The term “having” has the same meaning as “comprising” and may be replaced with either the term “consisting of” or “consisting essentially of”.

[0034] “Stringent”, “moderate,” and “low” hybridization conditions are as defined below.

[0035] A sequence which is “operably linked” to a regulatory sequence such as a promoter means that said regulatory element is in the correct location and orientation in relation to the nucleic acid to control RNA polymerase initiation and expression of the nucleic acid of interest. As used herein, the term “operably linked” refers to a linkage of polynucleotide elements in a functional relationship. For instance, a promoter or enhancer is operably linked to a coding sequence if it affects the transcription of the coding sequence.

[0036] The terms “base paired” and “Watson & Crick base paired” are used interchangeably herein to refer to nucleotides which can be hydrogen bonded to one another be virtue of their sequence identities in a manner like that found in double-helical DNA with thymine or uracil residues linked to adenine residues by two hydrogen bonds and cytosine and guanine residues linked by three hydrogen bonds (See Stryer, L., Biochemistry, 4th edition, 1995).

[0037] The terms “complementary” or “complement thereof” are used herein to refer to the sequences of polynucleotides which are capable of forming Watson & Crick base pairing with another specified polynucleotide throughout the entirety of the complementary region. For the purpose of the present invention, a first polynucleotide is deemed to be complementary to a second polynucleotide when each base in the first polynucleotide is paired with its complementary base. Complementary bases are, generally, A and T (or A and U), or C and G. “Complement” is used herein as a synonym from “complementary polynucleotide,” “complementary nucleic acid” and “complementary nucleotide sequence”. These terms are applied to pairs of polynucleotides based solely upon their sequences and not any particular set of conditions under which the two polynucleotides would actually bind. Preferably, a “complementary” sequence is a sequence which an A at each position where there is a T on the opposite strand, a T at each position where there is an A on the opposite strand, a G at each position where there is a C on the opposite strand and a C at each position where there is a G on the opposite strand.

[0038] The term “allele” is used herein to refer to variants of a nucleotide sequence. A biallelic polymorphism has two forms. Diploid organisms may be homozygous or heterozygous for an allelic form. Unless otherwise specified, the polynucleotides of the present invention encompass all allelic variants of the disclosed polynucleotides.

[0039] The term “upstream” is used herein to refer to a location that is toward the 5′ end of the polynucleotide from a specific reference point.

[0040] As used herein, the term “non-human animal” refers to any non-human vertebrate animal, including insects, birds, rodents and more usually mammals. Preferred non-human animals include: primates; farm animals such as swine, goats, sheep, donkeys, cattle, horses, chickens, rabbits; and rodents, more preferably rats or mice. As used herein, the term “animal” is used to refer to any species in the animal kingdom, preferably vertebrates, including birds and fish, and more preferable a mammal. Both the terms “animal” and “mammal” expressly embrace human subjects unless preceded with the term “non-human”.

[0041] The terms “vertebrate nucleic acid” and “vertebrate polpeptide” are used herein to refer to any nucleic acid or polypeptide respectively which are derived from a vertebrate species including birds and more usually mammals, preferably primates such as humans, farm animals such as swine, goats, sheep, donkeys, and horses, rabbits or rodents, more preferably rats or mice. As used herein, the term “vertebrate” is used to refer to any vertebrate, preferably a mammal. The term “vertebrate” expressly embraces human subjects unless preceded with the term “non-human”

[0042] “Stringent”, “moderate,” and “low” hybridization conditions are as defined below.

[0043] The term “capable of hybridizing to the polyA tail of said mRNA” refers to and embraces all primers containing stretches of thymidine residues, so-called oligo(dT) primers, that hybridize to the 3′ end of eukaryotic poly(A)+mRNAs to prime the synthesis of a first cDNA strand. Techniques for generating said oligo(dT) primers and hybridizing them to mRNA to subsequently prime the reverse transcription of said hybridized mRNA to generate a first cDNA strand are well known to those skilled in the art and are described in Current Protocols in Molecular Biology, John Wiley and Sons, Inc. 1997 and Sambrook et al., Molecular Cloning: A Laboratory Manual, Second Edition, Cold Spring Harbor Laboratory Press, 1989, the entire disclosures of which are incorporated herein by reference. Preferably, said oligo(dT) primers are present in a large excess in order to allow the hybridization of all mRNA 3′ends to at least one oligo(dT) molecule. The priming and reverse transcription step are preferably performed between 37° C. and 55° C. depending on the type of reverse transcriptase used.

[0044] Preferred oligo(dT) primers for priming reverse transcription of mRNAs are oligonucleotides containing a stretch of thymidine residues of sufficient length to hybridize specifically to the polyA tail of mRNAs, preferably of 12 to 18 thymidine residues in length. More preferably, such oligo(T) primers comprise an additional sequence upstream of the poly(dT) stretch in order to allow the addition of a given sequence to the 5′end of all first cDNA strands which may then be used to facilitate subsequent manipulation of the cDNA. Preferably, this added sequence is 8 to 60 residues in length. For instance, the addition of a restriction site in 5′ of cDNAs facilitates subcloning of the obtained cDNA. Alternatively, such an added 5′end may also be used to design primers of PCR to specifically amplify cDNA clones of interest.

[0045] In particular, the present invention relates to cDNAs which were derived from genes encoding secreted proteins. As used herein, a “secreted” protein is one which, when expressed in a suitable host cell, is transported across or through a membrane, including transport as a result of signal peptides in its amino acid sequence. “Secreted” proteins include without limitation proteins secreted wholly (e.g. soluble proteins), or partially (e.g. receptors) from the cell in which they are expressed. “Secreted” proteins also include without limitation proteins which are transported across the membrane of the endoplasmic reticulum.

[0046] cDNAs encoding secreted proteins may include nucleic acid sequences, called signal sequences, which encode signal peptides which direct the extracellular secretion of the proteins encoded by the cDNAs. Generally, the signal peptides are located at the amino termini of secreted proteins. Polypeptides comprising these signal peptides (as delineated in the sequence

[0047] Secreted proteins are translated by ribosomes associated with the “rough” endoplasmic reticulum. Generally, secreted proteins are co-translationally transferred to the membrane of the endoplasmic reticulum. Association of the ribosome with the endoplasmic reticulum during translation of secreted proteins is mediated by the signal peptide. The signal peptide is typically cleaved following its co-translational entry into the endoplasmic reticulum. After delivery to the endoplasmic reticulum, secreted proteins may proceed through the Golgi apparatus. In the Golgi apparatus, the proteins may undergo post-translational modification before entering secretory vesicles which transport them across the cell membrane.

[0048] The cDNAs of the present invention have several important applications. For example, they may be used to express the entire secreted protein which they encode. Alternatively, they may be used to express fragments of the secreted protein. The fragments may comprise the signal peptides encoded by the cDNAs or the mature proteins encoded by the cDNAs (i.e. the proteins generated when the signal peptide is cleaved off). The cDNAs and fragments thereof also have important applications as polynucleotides. For example, the cDNAs of the sequence listing and fragments thereof, may be used to distinguish human tissues/cells from non-human tissues/cells and to distinguish between human tissues/cells that do and do not express the polynucleotides comprising the cDNAs. By knowing the tissue expression pattern of the cDNAs, either through routine experimentation or by using the instant disclosure, the polynucleotides of the present invention may be used in methods of determining the identity of an unknown tissue/cell sample. As part of determining the identity of an unknown tissue/cell sample, the polynucleotides of the present invention may be used to determine what the unknown tissue/cell sample is and what the unknown sample is not. For example, if a cDNA is expressed in a particular tissue/cell type, and the unknown tissue/cell sample does not express the cDNA, it may be inferred that the unknown tissue/cells are either not human or not the same human tissue/cell type as that which expresses the cDNA. These methods of determining tissue/cell identity are based on methods which detect the presence or absence of the mRNA (or corresponding cDNA) in a tissue/cell sample using methods well know in the art (e.g., hybridization or PCR based methods).

[0049] In other useful applications, fragments of the cDNAs encoding signal peptides as well as degenerate polynucleotides encoding the same, may be ligated to sequences encoding either the polypeptide from the same gene or to sequences encoding a heterologous polypeptide to facilitate secretion.

[0050] Antibodies which specifically recognize the entire secreted proteins encoded by the cDNAs or fragments thereof having at least 6 consecutive amino acids, 8 consecutive amino acids, 10 consecutive amino acids, at least 15 consecutive amino acids, at least 25 consecutive amino acids, or at least 40 consecutive amino acids may also be obtained as described below. Antibodies which specifically recognize the mature protein generated when the signal peptide is cleaved may also be obtained as described below. Similarly, antibodies which specifically recognize the signal peptides encoded by the cDNAs may also be obtained.

[0051] In some embodiments, the cDNAs include the signal sequence. In other embodiments, the cDNAs may include the full coding sequence for the mature protein (i.e. the protein generated when the signal polypeptide is cleaved off). In addition, the cDNAs may include regulatory regions upstream of the translation start site or downstream of the stop codon which control the amount, location, or developmental stage of gene expression. As discussed above, secreted proteins are therapeutically important. Thus, the proteins expressed from the cDNAs may be useful in treating or controlling a variety of human conditions. The cDNAs may also be used to obtain the corresponding genomic DNA. The term “corresponding genomic DNA” refers to the genomic DNA which encodes mRNA which includes the sequence of one of the strands of the cDNA in which thymidine residues in the sequence of the cDNA are replaced by uracil residues in the RNA.

[0052] The cDNAs or genomic DNAs obtained therefrom may be used in forensic procedures to identify individuals or in diagnostic procedures to identify individuals having genetic diseases resulting from abnormal expression of the genes corresponding to the cDNAs. In addition, the present invention is useful for constructing a high resolution map of the human chromosomes.

[0053] The present invention also relates to secretion vectors capable of directing the secretion of a protein of interest. Such vectors may be used in gene therapy strategies in which it is desired to produce a gene product in one cell which is to be delivered to another location in the body. Secretion vectors may also facilitate the purification of desired proteins.

[0054] The present invention also relates to expression vectors capable of directing the expression of an inserted gene in a desired spatial or temporal manner or at a desired level. Such vectors may include sequences upstream of the cDNAs such as promoters or upstream regulatory sequences.

[0055] In addition, the present invention may also be used for gene therapy to control or treat genetic diseases. Signal peptides may also be fused to heterologous proteins to direct their extracellular secretion.

[0056] One embodiment of the present invention is a purified or isolated nucleic acid comprising the sequence of one of SEQ ID NOs: 1-405 or a sequence complementary thereto, allelic variants thereof, and degenerate variants thereof. In one aspect of this embodiment, the nucleic acid is recombinant.

[0057] Another embodiment of the present invention is a purified or isolated nucleic acid comprising at least 8 consecutive bases of the sequence of one of SEQ ID NOs: 1-405 or one of the sequences complementary thereto, allelic variants thereof, and degenerate variants thereof. In one aspect of this embodiment, the nucleic acid comprises at least 10, 12, 15, 18, 20, 25, 28, 30, 35, 40, 50, 75, 100, 150, 200, 300, 400, 500, 1000 or 2000 consecutive bases of one of the sequences of SEQ ID NOs: 1-405 or one of the sequences complementary thereto, allelic variants thereof, and degenerate variants thereof. The nucleic acid may be a recombinant nucleic acid.

[0058] In addition to the above preferred nucleic acid sizes, further preferred sub-genuses of nucleic acids comprise at least 8 nucleotides, wherein “at least 8” is defined as any integer between 8 and the integer representing the 3′ most nucleotide position as set forth in the sequence listing or elsewhere herein. Further included as preferred polynucleotides of the present invention are nucleic acid fragments at least 8 nucleotides in length, as described above, that are further specified in terms of their 5′ and 3′ position. The 5′ and 3′ positions are represented by the position numbers set forth in the sequence listing below. For allelic and degenerate variants, position 1 is defined as the 5′ most nucleotide of the ORF, i.e., the nucleotide “A” of the start codon with the remaining nucleotides numbered consecutively. Therefore, every combination of a 5′ and 3′ nucleotide position that a polynucleotide fragment of the present invention, at least 8 contiguous nucleotides in length, could occupy is included in the invention as an individual species. The polynucleotide fragments specified by 5′ and 3′ positions can be immediately envisaged and are therefore not individually listed solely for the purpose of not unnecessarily lengthening the specifications.

[0059] It is noted that the above species of polynucleotide fragments of the present invention may alternatively be described by the formula “a to b”; where “x” equals the 5″ most nucleotide position and “y” equals the 3″ most nucleotide position of the polynucleotide; and further where “x” equals an integer between 1 and the number of nucleotides of the polynucleotide sequence of the present invention minus 8, and where “y” equals an integer between 9 and the number of nucleotides of the polynucleotide sequence of the present invention; and where “x” is an integer smaller then “y” by at least 8.

[0060] The present invention also provides for the exclusion of any species of polynucleotide fragments of the present invention specified by 5′ and 3′ positions or sub-genuses of polynucleotides specified by size in nucleotides as described above. Any number of fragments specified by 5′ and 3′ positions or by size in nucleotides, as described above, may be excluded.

[0061] Another embodiment of the present invention is a vertebrate purified or isolated nucleic acid of at least 15, 18, 20, 23, 25, 28, 30, 35, 40, 50, 75, 100, 200, 300, 500 or 1000 nucleotides in length which hybridizes under stringent conditions to the sequence of one of SEQ ID NOs: 1-405 or a sequence complementary to one of the sequences of SEQ ID NOs: 1-405. In one aspect of this embodiment, the nucleic acid is recombinant.

[0062] Another embodiment of the present invention is a purified or isolated nucleic acid comprising the full coding sequences of one of SEQ ID NOs: 1-405, or an allelic variant thereof, wherein the full coding sequence optionally comprises the sequence encoding signal peptide as well as the sequence encoding mature protein. In one aspect of this embodiment, the nucleic acid is recombinant.

[0063] A further embodiment of the present invention is a purified or isolated nucleic acid comprising the nucleotides of one of SEQ ID NOs: 1-405, or an allelic variant thereof which encode a mature protein. In one aspect of this embodiment, the nucleic acid is recombinant. In another aspect of this embodiment, the nucleic acid is an expression vector wherein said nucleotides of one of SEQ ID NOs: 1-405, or an allelic variant thereof which encode a mature protein, are operably linked to a promoter.

[0064] Yet another embodiment of the present invention is a purified or isolated nucleic acid comprising the nucleotides of one of SEQ ID NOs: 1-405, or an allelic variant thereof, which encode the signal peptide. In one aspect of this embodiment, the nucleic acid is recombinant. In another aspect of this embodiment, the nucleic acid is an fusion vector wherein said nucleotides of one of SEQ ID NOs: 1-405, or an allelic variant thereof which encode the signal peptide, are operably linked to a second nucleic acid encoding an heterologous polypeptide.

[0065] Another embodiment of the present invention is a purified or isolated nucleic acid encoding a polypeptide comprising the sequence of one of the sequences of SEQ ID NOs: 406-810, or allelic variant thereof. In one aspect of this embodiment, the nucleic acid is recombinant.

[0066] Another embodiment of the present invention is a purified or isolated nucleic acid encoding a polypeptide comprising the sequence of a mature protein included in one of the sequences of SEQ ID NOs: 406-810, or allelic variant thereof. In one aspect of this embodiment, the nucleic acid is recombinant.

[0067] Another embodiment of the present invention is a purified or isolated nucleic acid encoding a polypeptide comprising the sequence of a signal peptide included in one of the sequences of SEQ ID NOs: 406-810, or allelic variant thereof. In one aspect of this embodiment, the nucleic acid is recombinant. In another aspect it is present in a vector of the invention.

[0068] Further embodiments of the invention include isolated polynucleotides that comprise, a nucleotide sequence at least 70% identical, more preferably at least 75% identical, and still more preferably at least 80%, 85%, 90%, 95%, 96%, 97%, 98%, or 99% identical to any of the polynucleotides of the present invention. Methods of determining identity include those well known in the art and described herein.

[0069] Yet another embodiment of the present invention is a purified or isolated protein comprising the sequence of one of SEQ ID NOs: 406-810, or allelic variant thereof.

[0070] Another embodiment of the present invention is a purified or isolated polypeptide comprising at least 5 or 8 consecutive amino acids of one of the sequences of SEQ ID NOs: 406-810. In one aspect of this embodiment, the purified or isolated polypeptide comprises at least 10, 12, 15, 20, 25, 30, 35, 40, 50, 60, 75, 100, 150 or 200 consecutive amino acids of one of the sequences of SEQ ID NOs: 406-810.

[0071] In addition to the above polypeptide fragments, further preferred sub-genuses of polypeptides comprise at least 8 amino acids, wherein “at least 8” is defined as any integer between 8 and the integer representing the C-terminal amino acid of the polypeptide of the present invention including the polypeptide sequences of the sequence listing below. Further included are species of polypeptide fragments at least 8 amino acids in length, as described above, that are further specified in terms of their N-terminal and C-terminal positions. Preferred species of polypeptide fragments specified by their N-terminal and C-terminal positions include the signal peptides delineated in the sequence listing below. However, included in the present invention as individual species are all polypeptide fragments, at least 8 amino acids in length, as described above, and may be particularly specified by a N-terminal and C-terminal position. That is, every combination of a N-terminal and C-terminal position that a fragment at least 8 contiguous amino acid residues in length could occupy, on any given amino acid sequence of the sequence listing or of the present invention is included in the present invention

[0072] The present invention also provides for the exclusion of any fragment species specified by N-terminal and C-terminal positions or of any fragment sub-genus specified by size in amino acid residues as described above. Any number of fragments specified by N-terminal and C-terminal positions or by size in amino acid residues as described above may be excluded as individual species.

[0073] The above polypeptide fragments of the present invention can be immediately envisaged using the above description and are therefore not individually listed solely for the purpose of not unnecessarily lengthening the specification. Moreover, the above fragments need not be active since they would be useful, for example, in immunoassays, in epitope mapping, epitope tagging, as vaccines, and as molecular weight markers. The above fragments may also be used to generate antibodies to a particular portion of the polypeptide. These antibodies can then be used in immunoassays well known in the art to distinguish between human and non-human cells and tissues or to determine whether cells or tissues in a biological sample are or are not of the same type which express the polypeptide of the present invention. Preferred polypeptide fragments of the present invention comprising a signal peptide may be used to facilitate secretion of either the polypeptide of the same gene or a heterologous polypeptide using methods well known in the art.

[0074] Another embodiment of the present invention is an isolated or purified polypeptide comprising a signal peptide of one of the polypeptides of SEQ ID NOs: 406-810.

[0075] Yet another embodiment of the present invention is an isolated or purified polypeptide comprising a mature protein of one of the polypeptides of SEQ ID NOs: 406-810.

[0076] Yet another embodiment of the present invention is an isolated or purified polypeptide comprising a fall length polypeptide, mature protein, or signal peptide encoded by an allelic variant of the polynucleotides of the present invention.

[0077] A further embodiment of the present invention are polypeptides having an amino acid sequence with at least 70% similarity, and more preferably at least 75%, 80%, 85%, 90%, 95%, 96%, 97%, 98%, or 99% similarity to a polypeptide of the present invention, as well as polypeptides having an amino acid sequence at least 70% identical, more preferably at least 75% identical, and still more preferably 80%, 85%, 90%, 95%, 96%, 97%, 98%, or 99% identical to a polypeptide of the present invention. Further included in the invention are isolated nucleic acid molecules encoding such polypeptides. Methods for determining identity include those well known in the art and described herein.

[0078] A further embodiment of the present invention is a method of making a protein comprising one of the sequences of SEQ ID NO: 406-810, comprising the steps of obtaining a cDNA comprising one of the sequences of sequence of SEQ ID NO: 1-405, inserting the cDNA in an expression vector such that the cDNA is operably linked to a promoter, and introducing the expression vector into a host cell whereby the host cell produces the protein encoded by said cDNA. In one aspect of this embodiment, the method further comprises the step of isolating the protein.

[0079] Another embodiment of the present invention is a protein obtainable by the method described in the preceding paragraph.

[0080] Another embodiment of the present invention is a method of making a protein comprising the amino acid sequence of the mature protein contained in one of the sequences of SEQ ID NO: 406-810, comprising the steps of obtaining a cDNA comprising one of the nucleotides sequence of sequence of SEQ ID NO: 1-405 which encode for the mature protein, inserting the cDNA in an expression vector such that the cDNA is operably linked to a promoter, and introducing the expression vector into a host cell whereby the host cell produces the mature protein encoded by the cDNA. In one aspect of this embodiment, the method further comprises the step of isolating the protein.

[0081] Another embodiment of the present invention is a mature protein obtainable by the method described in the preceding paragraph.

[0082] Another embodiment of the present invention is a host cell containing the purified or isolated nucleic acids comprising the sequence of one of SEQ ID NOs: 1-405 or a sequence complementary thereto described herein.

[0083] Another embodiment of the present invention is a host cell containing the purified or isolated nucleic acids comprising the full coding sequences of one of SEQ ID NOs: 1-405, wherein the full coding sequence comprises the sequence encoding the signal peptide and the sequence encoding the mature protein described herein.

[0084] Another embodiment of the present invention is a host cell containing the purified or isolated nucleic acids comprising the nucleotides of one of SEQ ID NOs: 1-405 which encode a mature protein which are described herein.

[0085] Another embodiment of the present invention is a host cell containing the purified or isolated nucleic acids comprising the nucleotides of one of SEQ ID NOs: 1-405 which encode the signal peptide which are described herein.

[0086] Another embodiment of the present invention is a purified or isolated antibody capable of specifically binding to a protein comprising the sequence of one of SEQ ID NOs: 406-810. In one aspect of this embodiment, the antibody is capable of binding to a polypeptide comprising at least 6 consecutive amino acids, at least 8 consecutive amino acids, or at least 10 consecutive amino acids of the sequence of one of SEQ ID NOs: 406-810.

[0087] Another embodiment of the present invention is an array of cDNAs or fragments thereof of at least 15 nucleotides in length which includes at least one of the sequences of SEQ ID NOs: 1-405, or one of the sequences complementary to the sequences of SEQ ID NOs: 1-405, or a fragment thereof of at least 15 consecutive nucleotides. In one aspect of this embodiment, the array includes at least two of the sequences of SEQ ID NOs: 1-405, the sequences complementary to the sequences of SEQ ID NOs: 1-405, or fragments thereof of at least 15 consecutive nucleotides. In another aspect of this embodiment, the array includes at least five of the sequences of SEQ ID NOs: 1-405, the sequences complementary to the sequences of SEQ ID NOs: 1-405, or fragments thereof of at least 15 consecutive nucleotides.

[0088] A further embodiment of the invention encompasses purified polynucleotides comprising an insert from a clone deposited in an ECACC deposit, which contains the sequences of SEQ ID NOs. 2-17 and 19-23, having an accession No. 99061735 and named SignalTag 15061999 or deposited in an ECACC deposit having an accession No. 98121805 and named SignalTag 166-191, which contains SEQ ID NOs.: 24-50, or a fragment of these nucleic acids comprising a contiguous span of at least 8, 10, 12, 15, 18, 20, 25, 28, 30, 35, 40, 50, 75, 100, 150, 200, 300, 400, 500, 1000 or 2000 nucleotides of said insert. In one aspect of this embodiment, the purified polynucleotide is recombinant.

[0089] An additional embodiment of the invention encompasses purified polypeptides which comprise, consist of, or consist essentially of an amino acid sequence encoded by the insert from a clone deposited in an ECACC deposit, which contains the sequences of SEQ ID NOs. 2-17 and 19-23, having an accession No. 99061735 and named SignalTag 15061999 or deposited in an ECACC deposit having an accession No. 98121805 and named SignalTag 166-191, which contains SEQ ID NOs.: 24-50, as well as polypeptides which comprise a fragment of said amino acid sequence consisting of a signal peptide, a mature protein, or a contiguous span of at least 5, 8, 10, 12, 15, 20, 25, 30, 35, 40, 50, 60, 75, 100, 150 or 200 amino acids encoded by said insert.

[0090] An additional embodiment of the invention encompasses purified polypeptides which comprise a contiguous span of at least 5, 8, 10, 12, 15, 20, 25, 30, 35, 40, 50, 60, 75, 100, 150 or 200 amino acids of SEQ ID NOs: 406-810, wherein said contiguous span comprises at least one of the amino acid positions which was not shown to be identical to a public sequence in the instant application. Also encompassed by the invention are purified polynucleotides encoding said polypeptides.

[0091] Another embodiment of the present invention is a computer readable medium having stored thereon a sequence selected from the group consisting of a cDNA code of SEQ ID NOs. 1-405 and a polypeptide code of SEQ ID NOs. 406-810.

[0092] Another embodiment of the present invention is a computer system comprising a processor and a data storage device wherein the data storage device has stored thereon a sequence selected from the group consisting of a cDNA code of SEQ ID NOs. 1-405 and a polypeptide code of SEQ ID NOs. 406-810. In some embodiments the computer system further comprises a sequence comparer and a data storage device having reference sequences stored thereon. For example, the sequence comparer may comprise a computer program which indicates polymorphisms. In other aspects of the computer system, the system further comprises an identifier which identifies features in said sequence.

[0093] Another embodiment of the present invention is a method for comparing a first sequence to a reference sequence wherein the first sequence is selected from the group consisting of a cDNA code of SEQ ID NOs. 1-405 and a polypeptide code of SEQ ID NOs. 406-810 comprising the steps of reading the first sequence and the reference sequence through use of a computer program which compares sequences and determining differences between the first sequence and the reference sequence with the computer program. In some aspects of this embodiment, said step of determining differences between the first sequence and the reference sequence comprises identifying polymorphisms.

[0094] Another aspect of the present invention is a method for determining the level of identity between a first sequence and a reference sequence, wherein the first sequence is selected from the group consisting of a cDNA code of SEQ ID NOs. 1-405 and a polypeptide code of SEQ ID NOs. 406-810, comprising the steps of reading the first sequence and the reference sequence through the use of a computer program which determines identity levels and determining identity between the first sequence and the reference sequence with the computer program.

[0095] Another embodiment of the present invention is a method for identifying a feature in a sequence selected from the group consisting of a cDNA code of SEQ ID NOs. 1-405 and a polypeptide code of SEQ ID NOs. 406-810 comprising the steps of reading the sequence through the use of a computer program which identifies features in sequences and identifying features in the sequence with said computer program. In one aspect of this embodiment, the computer program comprises a computer program which identifies open reading frames. In a further embodiment, the computer program comprises a program that identifies linear or structural motifs in a polypeptide sequence.

### BRIEF DESCRIPTION OF THE DRAWINGS

[0096] FIG. 1 is a table with all of the parameters that can be used for each step of cDNA analysis.

[0097] FIG. 2 is an analysis of the 43 amino terminal amino acids of all human SwissProt proteins to determine the frequency of false positives and false negatives using the techniques for signal peptide identification described herein.

[0098] FIG. 3 provides a diagram of a RT-PCR-based method to isolate cDNAs containing sequences adjacent to 5′ESTs used to obtain them

[0099] FIG. 4 is a block diagram of an exemplary computer system.

[0100] FIG. 5 is a flow diagram illustrating one embodiment of a process 200 for comparing a new nucleotide or protein sequence with a database of sequences in order to determine the identity levels between the new sequence and the sequences in the database.

[0101] FIG. 6 is a flow diagram illustrating one embodiment of a process 250 in a computer for determining whether two sequences are homologous.

[0102] FIG. 7 is a flow diagram illustrating one embodiment of an identifier process 300 for detecting the presence of a feature in a sequence.

### BRIEF DESCRIPTION OF THE TABLES

[0103] Table I provides structural features of each cDNAs of SEQ ID NOs: 1-405, i.e., the locations of the full coding sequences, the locations of the nucleotides which encode the signal peptides, the locations of nucleotides which encode the mature proteins generated by cleavage of the signal peptides, the locations of stop codons, the locations of the polyA signals and the locations of polyA sites.

[0104] Table II provides structural features for each polypeptide of SEQ ID NOs: 406-810, i.e; the locations of the full length polypeptide, the locations of the signal peptides, and the locations of the mature polypeptide created by cleaving the signal peptide from the full length polypeptide.

[0105] Table III lists the positions of preferred fragments, defined as fragments not sharing more than 90% identity with any public sequence over at least 30 nucleotides in length, for some cDNAs of SEQ ID NOs: 1-405.

[0106] Table IVa provides the positions of fragments which are preferably included in the present invention while Table IVb provides the positions of fragments which are preferably excluded from the present invention. Tables IVa and IVb provides for the inclusion and exclusion of polynucleotides in addition to those described elsewhere in the specification and is therefore, not meant as limiting description.

[0107] Table V provides the applicant's internal designation number assigned to each sequence identification number and indicates whether the sequence is a nucleic acid sequence or a polypeptide sequence.

[0108] Table VI lists the Genset's libraries of tissues and cell types examined that express the polynucleotides of the present invention.

[0109] Table VII relates to the bias in spatial distribution of the polynucleotide sequences of the present invention.

[0110] Table VIII relates to the spatial distribution of the polynucleotide sequences of the sequence listing using information from public databases.

[0111] Table IX lists known biologically structural and functional domains for the cDNA of the present invention.

[0112] Table X lists antigenic peaks of predicted antigenic epitopes for cDNAs or the present invention.

[0113] Table XI lists the putative chromosomal location of the polynucleotides of the present invention.

### DETAILED DESCRIPTION OF THE PREFERRED EMBODIMENT

[0114] I. Obtaining cDNA Libraries Including the 5′Ends of their Corresponding mRNAS

[0115] The cDNAs of the present invention may include the entire coding sequence of the protein encoded by the corresponding mRNA, including the authentic translation start site, the signal sequence, and the sequence encoding the mature protein remaining after cleavage of the signal peptide. Such cDNAs are referred to herein as “full length cDNAs.” Alternatively, the cDNAs may include only the sequence encoding the mature protein remaining after cleavage of the signal peptide, or only the sequence encoding the signal peptide.

[0116] The methods explained therein can also be used to obtain cDNAs which encode less than the entire coding sequence of the secreted proteins encoded by the genes corresponding to the cDNAs. In some embodiments, the cDNAs isolated using these methods encode at least 5 amino acids of one of the proteins encoded by the sequences of SEQ ID NOs: 1-405. In further embodiments, the cDNAs encode at least 10, 12, 15, 20, 25, 30, 35, 40, 50, 60, 75, 100, 150 or 200 consecutive amino acids of the proteins encoded by the sequences of SEQ ID NOs: 1-405. In a preferred embodiment, the cDNAs encode a full length protein sequence, which includes the protein coding sequences of SEQ ID NOs: 1-405.

[0117] The cDNAs of the present invention were obtained from cDNA libraries derived from mRNAs having intact 5′ ends as described in Examples 1 to 5 using either a chemical or enzymatic approach.

### EXAMPLE 1

[0118] Preparation of mRNA

[0119] Total human RNAs or polyA+ RNAs derived from different tissues were respectively purchased from LABIMO and CLONTECH and used to generate cDNA libraries as described below. The purchased RNA had been isolated from cells or tissues using acid guanidium thiocyanate-phenol-chloroform extraction (Chomczyniski and Sacchi, Analytical Biochemistry 162:156-159, 1987). PolyA+ RNA was isolated from total RNA (LABIMO) by two passes of oligo dT chromatography, as described by Aviv and Leder, Proc. Natl. Acad. Sci. USA 69:1408-1412, 1972) in order to eliminate ribosomal RNA.

[0120] The quality and the integrity of the polyA+ RNAs were checked. Northern blots hybridized with a probe corresponding to an ubiquitous mRNA, such as elongation factor 1 or elongation factor 2, were used to confirm that the mRNAs were not degraded. Contamination of the polyA+ mRNAs by ribosomal sequences was checked using Northern blots and a probe derived from the sequence of the 28S rRNA. Preparations of mRNAs with less than 5% of rRNAs were used in library construction. To avoid constructing libraries with RNAs contaminated by exogenous sequences (prokaryotic or fungal), the presence of bacterial 16S ribosomal sequences or of two highly expressed fungal mRNAs was examined using PCR.

### EXAMPLE 2

[0121] Methods for Obtaining mRNAs having Intact 5′ Ends

[0122] Following preparation of the mRNAs from various tissues as described above, selection of mRNA with intact 5′ ends and specific attachment of an oligonucleotide tag to the 5′ end of such mRNA is performed using either a chemical or enzymatic approach. Both techniques take advantage of the presence of the “cap” structure, which characterizes the 5′end of intact mRNAs and which comprises a guanosine generally methylated once, at the 7 position.

[0123] The chemical modification approach involves the optional elimination of the 2′,3′-cis diol of the 3′ terminal ribose, the oxidation of the 2′, 3′, -cis diol of the ribose linked to the cap of the 5′ ends of the mRNAs into a dialdehyde, and the coupling of the dialdehyde to a derivatized oligonucleotide tag. Further detail regarding the chemical approaches for obtaining mRNAs having intact 5′ ends are disclosed in International Application No. WO96/34981, published Nov. 7, 1996, the disclosure of which is incorporated herein by reference in its entirety.

[0124] The enzymatic approach for ligating the oligonucleotide tag to the 5′ ends of mRNAs with intact 5′ ends involves the removal of the phosphate groups present on the 5′ ends of uncapped incomplete mRNAs, the subsequent decapping of mRNAs with intact 5′ ends and the ligation of the phosphate present at the 5′ end of the decapped mRNA to an oligonucleotide tag. Further detail regarding the enzymatic approaches for obtaining mRNAs having intact 5′ ends are disclosed in Dumas Milne Edwards J. B. (Doctoral Thesis of Paris VI University, Le clonage des ADNc complets: difficultes et perspectives nouvelles. Apports pour l'etude de la regulation de l'expression de la tryptophane hydroxylase de rat, 20 Dec. 1993), EP0 625572 and Kato et al., Gene 150:243-250 (1994), the disclosures of which are incorporated herein by reference in their entireties.

[0125] In either the chemical or the enzymatic approach, the oligonucleotide tag has a restriction enzyme site (e.g. EcoRI sites) therein to facilitate later cloning procedures. Following attachment of the oligonucleotide tag to the mRNA, the integrity of the mRNA was then examined by performing a Northern blot using a probe complementary to the oligonucleotide tag.

### EXAMPLE 3

[0126] cDNA Synthesis Using mRNA Templates having Intact 5′ Ends

[0127] For the mRNAs joined to oligonucleotide tags using either the chemical or the enzymatic method, first strand cDNA synthesis was performed using reverse transcriptase with an oligo-dT primer or random nonamer. In some instances, this oligo-dT primer contained an internal tag of at least 4 nucleotides which is different from one tissue to the other. In order to protect internal EcoRI sites in the cDNA from digestion at later steps in the procedure, methylated dCTP was used for first strand synthesis. After removal of RNA by an alkaline hydrolysis, the first strand of cDNA was precipitated using isopropanol in order to eliminate residual primers.

[0128] The second strand of the cDNA was then synthesized with a Klenow fragment using a primer corresponding to the 5′end of the ligated oligonucleotide. Preferably, the primer is 20-25 bases in length. Methylated dCTP was also used for second strand synthesis in order to protect internal EcoRI sites in the cDNA from digestion during the cloning process.

### EXAMPLE 4

[0129] Cloning of cDNAs Derived from mRNA with Intact 5′ Ends into BlueScript

[0130] Following second strand synthesis, the cDNAs were cloned into the phagemid pBlueScript II SK− vector (Stratagene). The ends of the cDNAs were blunted with T4 DNA polymerase (Biolabs) and the cDNA was digested with EcoRI. Since methylated dCTP was used during cDNA synthesis, the EcoRI site present in the tag was the only hemi-methylated site, hence the only site susceptible to EcoRI digestion. In some instances, to facilitate subcloning, an Hind III adaptor was added to the 3′ end of cDNAs.

[0131] The cDNAs were then size fractionated using either exclusion chromatography (AcA, Biosepra) or electrophoretic separation which yields 3 or 6 different fractions. The cDNAs were then directionally cloned either into pBlueScript using either the EcoRI and SmaI restriction sites or the EcoRI and Hind III restriction sites when the Hind III adaptator was present in the cDNAs. The ligation mixture was electroporated into bacteria and propagated under appropriate antibiotic selection.

### EXAMPLE 5

[0132] Selection of Clones having the Oligonucleotide Tag Attached Thereto

[0133] Clones containing the oligonucleotide tag attached to cDNAs were then selected as follows.

[0134] The plasmid DNAs containing cDNA libraries made as described above were purified (Qiagen). A positive selection of the tagged clones was performed as follows. Briefly, in this selection procedure, the plasmid DNA was converted to single stranded DNA using gene II endonuclease of the phage Fl in combination with an exonuclease (Chang et al., Gene 127:95-8, 1993) such as exonuclease III or T7 gene 6 exonuclease. The resulting single stranded DNA was then purified using paramagnetic beads as described by Fry et al., Biotechniques, 13: 124-131, 1992. In this procedure, the single stranded DNA was hybridized with a biotinylated oligonucleotide having a sequence corresponding to the 3′ end of the oligonucleotide tag described in example 2. Preferably, the primer has a length of 20-25 bases. Clones including a sequence complementary to the biotinylated oligonucleotide were captured by incubation with streptavidin coated magnetic beads followed by magnetic selection. After capture of the positive clones, the plasmid DNA was released from the magnetic beads and converted into double stranded DNA using a DNA polymerase such as the ThermoSequenase obtained from Amersham Pharmacia Biotech. Alternatively, protocols such as the Gene Trapper kit (Gibco BRL) may be used. The double stranded DNA was then electroporated into bacteria. The percentage of positive clones having the 5′ tag oligonucleotide was estimated to typically rank between 90 and 98% using dot blot analysis.

[0135] Following electroporation, the libraries were ordered in 384-microtiter plates (MTP). A copy of the MTP was stored for future needs. Then the libraries were transferred into 96 MTP.

[0136] II. Characterization of the 5′ Ends of Clones

[0137] In order to sequence only cDNAs which contain the 5′ ends of their corresponding MrRNA, a first round of sequencing was performed on the 5′ end of clones as described in example 6. In some instances, only a partial sequence of the clone, therein referred to as “5′EST” was obtained. In other instances, the complete sequence of the clone, herein referred to as a “cDNA” is obtained. A computer analysis was then performed on the 5′ ESTs or cDNAs as described in Examples 7 and 8 in order to evaluate the quality of the cDNA libraries and in order to select clones containing sequences of interest among cDNAs which contain the 5′ ends of their corresponding mRNA.

### EXAMPLE 6

[0138] Sequencing of The 5′End of cDNA Clones

[0139] The 5′ ends of cloned cDNAs were then sequenced as follows. Plasmid inserts were first amplified by PCR on PE 9600 thermocyclers (Perkin-Elmer, Applied Biosystems Division, Foster City, Calif.) using standard SETA-A and SETA-B primers (Genset SA), AmpliTaqGold (Perkin-Elmer), dNTPs (Boehringer), buffer and cycling conditions as recommended by the Perkin-Elmer Corporation.

[0140] PCR products were then sequenced using automatic ABI Prism 377 sequencers (Perkin Elmer). Sequencing reactions were performed using PE 9600 thermocyclers with standard dye-primer chemistry and ThermoSequenase (Amersham Pharmacia Biotech). The primers used were either T7 or 21M13 (available from Genset SA) as appropriate. The primers were labeled with the JOE, FAM, ROX and TAMRA dyes. The dNTPs and ddNTPs used in the sequencing reactions were purchased from Boehringer. Sequencing buffer, reagent concentrations and cycling conditions were as recommended by Amersham.

[0141] Following the sequencing reaction, the samples were precipitated with ethanol, resuspended in formamide loading buffer, and loaded on a standard 4% acrylamide gel. Electrophoresis was performed for 2.5 hours at 3000V on an ABI 377 sequencer, and the sequence data were collected and analyzed using the ABI Prism DNA Sequencing Analysis Software, version 2.1.2.

[0142] The sequence data obtained from the sequencing of 5′ ends of all cDNA libraries made as described above were transferred to a proprietary database, where quality control and validation steps were performed. A proprietary base-caller, working using a Unix system automatically flagged suspect peaks, taking into account the shape of the peaks, the inter-peak resolution, and the noise level. The proprietary base-caller also performed an automatic trimming. Any stretch of 25 or fewer bases having more than 4 suspect peaks was considered unreliable and was discarded. Sequences corresponding to cloning vector or ligation oligonucleotides were automatically removed from the sequences. However, the resulting sequences may contain 1 to 5 nucleotides belonging to the above mentioned sequences at their 5′ end. If needed, these can easily be removed on a case by case basis.

[0143] Following sequencing as described above, the sequences of the cDNA clones were entered in a database for storage and manipulation as described below. Before searching the cDNA clones in the database for sequences of interest, cDNAs derived from mRNAs which were not of interest were identified and eliminated, namely, endogenous contaminants (ribosomal RNAs, transfert RNAs, mitochondrial RNAs) and exogenous contaminants (prokaryotic RNAs and fungal RNAs) using software and parameters described in FIG. 1. In addition, cDNA sequences showing showing identity to repeated sequences (Alu, L1, THE and MER repeats, SSTR sequences or satellite, micro-satellite, or telomeric repeats) were identified and masked in further processing.

### EXAMPLE 7

[0144] Determination of Efficiency of 5′ End Selection

[0145] To determine the efficiency at which the above selection procedures isolated cDNAs which include the 5′ ends of their corresponding mRNAs, the sequences of 5′ESTs or cDNAs were aligned with a reference pool of complete mRNA/cDNA extracted from the EMBL release 57 using the FASTA algorithm. The reference mRNA/cDNA starting at the most 5′ transcription start site was obtained, and then compared to the 5′ transcription start site position of the 5′EST or cDNA. More than 75% of 5′ESTs or cDNAs had their 5′ ends close to the 5′ ends of the known sequence. As some of the mRNA sequences available in the EMBL database are deduced from genomic sequences, a 5′ end matching with these sequences will be counted as an internal match. Thus, the method used here underestimates the yield of 5′ESTs or cDNAs including the authentic 5′ ends of their corresponding mRNAs.

### EXAMPLE 8

[0146] Identification of Open Reading Frames Coding for Potential Signal Peptides

[0147] The obtained nucleic acid sequences were then screened to identify those having uninterrupted open reading frames (ORF) with a good coding probability using proprietary software. When the full-length cDNA was obtained, only complete ORFs, namely nucleic acid sequences beginning with a start codon and ending with a stop codon, longer than 150 nucleotides were considered. When only 5′EST sequences were obtained, both complete ORFS longer than 150 nucleotides and incomplete ORFs, namely nucleic acid sequences beginning with a start codon and extending up to the end of the 5′EST, longer than 60 nucleotides were considered.

[0148] The retrieved ORFs were then searched to identify potential signal motifs using slight modifications of the procedures disclosed in Von Heijne, Nucleic Acids Res. 14:46834690, 1986, the disclosure of which is incorporated herein by reference. Those 5′ESTs or cDNA sequences encoding a polypeptide with a score of at least 3.5 in the Von Heijne signal peptide identification matrix were considered to possess a signal sequence. Those 5′ESTs or cDNAs which matched a known human mRNA or EST sequence and had a 5′ end more than 30 nucleotides downstream of the known 5′ end were excluded from further analysis.

### EXAMPLE 9

[0149] Confirmation of Accuracy of Identification of Potential Signal Sequences in 5′ ESTs

[0150] The accuracy of the above procedure for identifying signal sequences encoding signal peptides was evaluated by applying the method to the 43 amino acids located at the N terminus of all human SwissProt proteins. The computed Von Heijne score for each protein was compared with the known characterization of the protein as being a secreted protein or a non-secreted protein. In this manner, the number of non-secreted proteins having a score higher than 3.5 (false positives) and the number of secreted proteins having a score lower than 3.5 (false negatives) could be calculated.

[0151] Using the results of the above analysis, the probability that a peptide encoded by the 5′ region of the mRNA is in fact a genuine signal peptide based on its Von Heijne's score was calculated based on either the assumption that 10% of human proteins are secreted or the assumption that 20% of human proteins are secreted. The results of this analysis are shown in FIG. 2.

[0152] Using the above method of identification of secretory proteins, 5′ ESTs of the following polypeptides known to be secreted were obtained: human glucagon, gamma interferon induced monokine precursor, secreted cyclophilin-like protein, human pleiotropin, and human biotinidase precursor. Thus, the above method successfully identified those 5′ ESTs which encode a signal peptide.

[0153] To confirm that the signal peptide encoded by the 5′ ESTs or cDNAs actually functions as a signal peptide, the signal sequences from the 5′ ESTs or cDNAs may be cloned into a vector designed for the identification of signal peptides. Such vectors are designed to confer the ability to grow in selective medium only to host cells containing a vector with an operably linked signal sequence. For example, to confirm that a 5′ EST or cDNA encodes a genuine signal peptide, the signal sequence of the 5′ EST or cDNA may be inserted upstream and in frame with a non-secreted form of the yeast invertase gene in signal peptide selection vectors such as those described in U.S. Pat. No. 5,536,637, the disclosure of which is incorporated herein by reference. Growth of host cells containing signal sequence selection vectors with the correctly inserted 5′ EST or cDNA signal sequence confirms that the 5′ EST or cDNA encodes a genuine signal peptide.

[0154] Alternatively, the presence of a signal peptide may be confirmed by cloning the 5′ESTs or cDNAs into expression vectors such as pXT1 as described below, or by constructing promoter-signal sequence-reporter gene vectors which encode fusion proteins between the signal peptide and an assayable reporter protein. After introduction of these vectors into a suitable host cell, such as COS cells or NIH 3T3 cells, the growth medium may be harvested and analyzed for the presence of the secreted protein. The medium from these cells is compared to the medium 10 from control cells containing vectors lacking the signal sequence or cDNA insert to identify vectors which encode a functional signal peptide or an authentic secreted protein.

### EXAMPLE 10

[0155] Evaluation of Expression Levels and Patterns of mRNAs Corresponding to 5′ ESTs or cDNAs

[0156] The spatial and temporal expression patterns of the mRNAs corresponding to the 5′ ESTs or cDNAs, as well as their expression levels, may be determined. Characterization of the spatial and temporal expression patterns and expression levels of these mRNAs is useful for constructing expression vectors capable of producing a desired level of gene product in a desired spatial or temporal manner, as will be discussed in more detail below.

[0157] In addition, cDNAs or 5′ ESTs whose corresponding mRNAs are associated with disease states may also be identified. For example, a particular disease may result from lack of expression, over expression, or under expression of an mRNA corresponding to a cDNA or 5′ EST. By comparing mRNA expression patterns and quantities in samples taken from healthy individuals with those from individuals suffering from a particular disease, cDNAs and 5′ ESTs responsible for the disease may be identified.

[0158] Expression levels and patterns of mRNAs corresponding to 5′ ESTs or cDNAs may be analyzed by solution hybridization with long probes as described in International Patent Application No. WO 97/05277, the entire contents of which are hereby incorporated by reference. Briefly, a 5′ EST, cDNA, or fragment thereof corresponding to the gene encoding the mRNA to be characterized is inserted at a cloning site immediately downstream of a bacteriophage (T3, T7 or SP6) RNA polymerase promoter to produce antisense RNA. Preferably, the 5′ EST or cDNA is 100 or more nucleotides in length. The plasmid is linearized and transcribed in the presence of ribonucleotides comprising modified ribonucleotides (i.e. biotin-UTP and DIG-UTP). An excess of this doubly labeled RNA is hybridized in solution with mRNA isolated from cells or tissues of interest. The hybridizations are performed under standard stringent conditions (40-50° C. for 16 hours in an 80% formamide, 0.4 M NaCl buffer, pH 7-8). The unhybridized probe is removed by digestion with ribonucleases specific for single-stranded RNA (i.e. RNases CL3, Ti, Phy M, U2 or A). The presence of the biotin-UTP modification enables capture of the hybrid on a microtitration plate coated with streptavidin. The presence of the DIG modification enables the hybrid to be detected and quantified by ELISA using an anti-DIG antibody coupled to alkaline phosphatase.

[0159] The 5′ ESTs, cDNAs, or fragments thereof may also be tagged with nucleotide sequences for the serial analysis of gene expression (SAGE) as disclosed in UK Patent Application No. 2 305 241 A, the entire contents of which are incorporated by reference. In this method, cDNAs are prepared from a cell, tissue, organism or other source of nucleic acid for which it is desired to determine gene expression patterns. The resulting cDNAs are separated into two pools. The cDNAs in each pool are cleaved with a first restriction endonuclease, called an “anchoring enzyme,” having a recognition site which is likely to be present at least once in most cDNAs. The fragments which contain the 5′ or 3′ most region of the cleaved cDNA are isolated by binding to a capture medium such as streptavidin coated beads. A first oligonucleotide linker having a first sequence for hybridization of an amplification primer and an internal restriction site for a “tagging endonuclease” is ligated to the digested cDNAs in the first pool. Digestion with the second endonuclease produces short “tag” fragments from the cDNAs.

[0160] A second oligonucleotide having a second sequence for hybridization of an amplification primer and an internal restriction site is ligated to the digested cDNAs in the second pool. The cDNA fragments in the second pool are also digested with the “tagging endonuclease” to generate short “tag” fragments derived from the cDNAs in the second pool. The “tags” resulting from digestion of the first and second pools with the anchoring enzyme and the tagging endonuclease are ligated to one another to produce “ditags.” In some embodiments, the ditags are concatamerized to produce ligation products containing from 2 to 200 ditags. The tag sequences are then determined and compared to the sequences of the 5′ ESTs or cDNAs to determine which 5′ ESTs or cDNAs are expressed in the cell, tissue, organism, or other source of nucleic acids from which the tags were derived. In this way, the expression pattern of the 5′ ESTs or cDNAs in the cell, tissue, organism, or other source of nucleic acids is obtained.

[0161] Quantitative analysis of gene expression may also be performed using arrays. As used herein, the term array means a one dimensional, two dimensional, or multidimensional arrangement of full length cDNAs (i.e. cDNAs which include the coding sequence for the signal peptide, the coding sequence for the mature protein, and a stop codon), cDNAs, 5′ ESTs or fragments of the full length cDNAs, cDNAs, or 5′ ESTs of sufficient length to permit specific detection of gene expression. Preferably, the fragments are at least 15 nucleotides in length. More preferably, the fragments are at least 100 nucleotides in length. More preferably, the fragments are more than 100 nucleotides in length. In some embodiments the fragments may be more than 500 nucleotides in length.

[0162] For example, quantitative analysis of gene expression may be performed with full length cDNAs, cDNAs, 5′ ESTs, or fragments thereof in a complementary DNA microarray as described by Schena et al. (Science 270:467-470, 1995; Proc. Natl. Acad. Sci. U.S.A. 93:10614-10619, 1996). Full length cDNAs, cDNAs, 5′ ESTs or fragments thereof are amplified by PCR and arrayed from 96-well microtiter plates onto silylated microscope slides using high-speed robotics. Printed arrays are incubated in a humid chamber to allow rehydration of the array elements and rinsed, once in 0.2% SDS for 1 min, twice in water for 1 min and once for 5 min in sodium borohydride solution. The arrays are submerged in water for 2 min at 95° C., transferred into 0.2% SDS for 1 min, rinsed twice with water, air dried and stored in the dark at 25° C.

[0163] Cell or tissue mRNA is isolated or commercially obtained and probes are prepared by a single round of reverse transcription. Probes are hybridized to 1 cm² microarrays under a 14×14 mm glass coverslip for 6-12 hours at 60° C. Arrays are washed for 5 min at 25° C. in low stringency wash buffer (1×SSC/0.2% SDS), then for 10 min at room temperature in high stringency wash buffer (0.1×SSC/0.2% SDS). Arrays are scanned in 0.1×SSC using a fluorescence laser scanning device fitted with a custom filter set. Accurate differential expression measurements are obtained by taking the average of the ratios of two independent hybridizations.

[0164] Quantitative analysis of the expression of genes may also be performed with full length cDNAs, cDNAs, 5′ ESTs, or fragments thereof in complementary DNA arrays as described by Pietu et al. (Genome Research 6:492-503, 1996). The full length cDNAs, cDNAs, 5′ ESTs or fragments thereof are PCR amplified and spotted on membranes. Then, mRNAs originating from various tissues or cells are labeled with radioactive nucleotides. After hybridization and washing in controlled conditions, the hybridized mRNAs are detected by phospho-imaging or autoradiography. Duplicate experiments are performed and a quantitative analysis of differentially expressed mRNAs is then performed.

[0165] Alternatively, expression analysis of the 5′ ESTs or cDNAs can be done through high density nucleotide arrays as described by Lockhart et al. (Nature Biotechnology 14: 1675-1680, 1996) and Sosnowsky et al. (Proc. Natl. Acad. Sci. 94:1119-1123, 1997). Oligonucleotides of 15-50 nucleotides corresponding to sequences of the 5′ ESTs or cDNAs are synthesized directly on the chip (Lockhart et al., supra) or synthesized and then addressed to the chip (Sosnowski et al., supra). Preferably, the oligonucleotides are about 20 nucleotides in length.

[0166] cDNA probes labeled with an appropriate compound, such as biotin, digoxigenin or fluorescent dye, are synthesized from the appropriate mRNA population and then randomly fragmented to an average size of 50 to 100 nucleotides. The said probes are then hybridized to the chip. After washing as described in Lockhart et al., supra and application of different electric fields (Sosnowsky et al., Proc. Natl. Acad. Sci. 94:1119-1123)., the dyes or labeling compounds are detected and quantified. Duplicate hybridizations are performed. Comparative analysis of the intensity of the signal originating from cDNA probes on the same target oligonucleotide in different cDNA samples indicates a differential expression of the mRNA corresponding to the 5′ EST or cDNA from which the oligonucleotide sequence has been designed.

[0167] III. Characterization of cDNAs including the 5′End of their Corresponding mRNA

### EXAMPLE 11

[0168] Characterization of the Complete Sequence of cDNA Clones

[0169] Clones which include the 5′end of their corresponding mRNA and which encode a new protein with a signal peptide as determined in the aforementioned procedure were then fully sequenced as follows.

[0170] First, both 5′ and 3′ ends of cloned cDNAs were sequenced twice in order to confirm the identity of the clone using a Die Terminator approach with the AmpliTaq DNA polymerase FS kit available from Perkin Elmer. Second, primer walking was performed if the full coding region had not been obtained yet using software such as OSP to choose primers and automated computer software such as ASMG (Sutton et al., Genome Science Technol. 1: 9-19, 1995) to construct contigs of walking sequences including the initial 5′ tag. Contigation was then performed using 5′ and 3′ sequences and eventually primer walking sequences. The sequence was considered complete when the resulting contigs included the full coding region as well as overlapping sequences with vector DNA on both ends. In addition, clones were entirely sequenced in order to obtain at least two sequences per clone. Preferably, the sequences were obtained from both sense and antisense strands. All the contigated sequences for each clone were then used to obtain a consensus sequence which was then submitted to the computer analysis described below.

[0171] Alternatively, clones which include the 5′end of their corresponding mRNA and which encode a new protein with a signal peptide, as determined in the aforementioned procedure, may be subcloned into an appropriate vector such as pED6dpc2 (DiscoverEase, Genetics Institute, Cambridge, Mass.) before full sequencing.

### EXAMPLE 12

[0172] Determination of Structural and Functional Features

[0173] Following identification of contaminants and masking of repeats, structural features, e.g. polyA tail and polyadenylation signal, of the sequences of cDNAs were subsequently determined using the algorithm, parameters and criteria defined in FIG. 1. Briefly, a polyA tail was defined as a homopolymeric stretch of at least 11 A with at most one alternative base within it. The polyA tail search was restricted to the last 100 nt of the sequence and limited to stretches of 11 consecutive A's because sequencing reactions are often not readable after such a polyA stretch. To search for a polyadenylation signal, the polyA tail was clipped from the full-length sequence. The 50 bp preceding the polyA tail were searched for the canonic polyadenylation AAUAAA signal allowing one mismatch to account for possible sequencing errors as well as known variation in the canonical sequence of the polyadenylation signal.

[0174] Functional features, e.g. ORFs and signal sequences, of the sequences of cDNAs were subsequently determined as follows. The 3 upper strand frames of cDNAs were searched for ORFs defined as the maximum length fragments beginning with a translation initiation codon and ending with a stop codon. ORFs encoding at least 80 amino acids were preferred. Each found ORF was then scanned for the presence of a signal peptide using the matrix method described in example 10.

[0175] Sequences of cDNAs were then compared, on a nucleotidic or proteic basis, to public sequences available at the time of filing.

### EXAMPLE 13

[0176] Selection of Full Length Sequences

[0177] cDNAs that had already been characterized by the aforementioned computer analysis were then submitted to an automatic procedure in order to preselect cDNAs containing sequences of interest.

[0178] a) Automatic Sequence Preselection

[0179] All cDNAs clipped for vector on both ends were considered. First, a negative selection was performed in order to eliminate sequences which resulted from either contaminants or artifacts as follows. Sequences matching contaminant sequences were discarded as well as those encoding ORF sequences exhibiting identity to repeats. Sequences lacking polyA tail were also discarded. Those cDNAs which matched a known human mRNA or EST sequence and had a 5′ end more than 30 nucleotides downstream of the known 5′ end were also excluded from further analysis. Only ORFs ending before the polyA tail were kept.

[0180] Then, for each remaining cDNA containing several ORFs, a preselection of ORFs was performed using the following criteria. The longest ORF was preferred. If the ORF sizes were similar, the chosen ORF was the one which signal peptide had the highest score according to Von Heijne method as defined in Example 10.

[0181] Sequences of cDNA clones were then compared pairwise with BLAST after masking of the repeat sequences. Sequences containing at least 90% identity over 30 nucleotides were clustered in the same class. Each cluster was then subjected to a clustal analysis that detects sequences resulting from internal priming or from alternative splicing, identical sequences or sequences with several frameshifts. This automatic analysis served as a basis for manual selection of the sequences.

[0182] b) Manual Sequence Selection

[0183] Manual selection was carried out using automatically generated reports for each sequenced cDNA clone. During the manual selection procedure, a selection was performed between clones belonging to the same class as follows. ORF sequences encoded by clones belonging to the same class were aligned and compared. If the identity between nucleotidic sequences of clones belonging to the same class was more than 90% over 30 nucleotide stretches or if the identity between amino acid sequences of clones belonging to the same class was more than 80% over 20 amino acid stretches, then the clones were considered as being identical. The chosen ORF was either the one exhibiting matches with known amino acid sequences or the best one according to the criteria mentioned in the automatic sequence preselection section. If the nucleotide and amino acid homologies were less than 90% and 80% respectively, the clones were said to encode distinct proteins which can be both selected if they contain sequences of interest.

[0184] Selection of full length cDNA clones encoding sequences of interest was performed using the following criteria. Structural parameters (initial tag, polyadenylation site and signal, eventually matches with public ESTs in 5′ or 3′ of the sequence) were first checked in order to confirm that the cDNA was complete in 5′ and in 3′. Then, homologies with known nucleic acids and proteins were examined in order to determine whether the clone sequence matched a known nucleic acid or protein sequence and, in the latter case, its covering rate and the date at which the sequence became public. If there was no extensive match with sequences other than ESTs or genomic DNA, or if the clone sequence included substantial new information, such as encoding a protein resulting from alternative splicing of an mRNA coding for an already known protein, the sequence was kept. Examples of such cloned full length cDNAs containing sequences of interest are described in Example 14. Sequences resulting from chimera or double inserts as assessed by identity to other sequences were discarded during this procedure.

### EXAMPLE 14

[0185] Characterization of Full-Length cDNAs

[0186] The procedure described above was used to obtain full-length cDNAs of the invention comprising the sequences of SEQ ID NOs: 1-405 derived from a variety of tissues. The polypeptides encoded by the extended or full-length cDNAs may be screened for the presence of known structural or functional motifs or for the presence of signatures or small amino acid sequences which are well conserved amongst the members of a protein family. Some of the results obtained for the polypeptides encoded by full-length cDNAs that were screened for the presence of known protein signatures and motifs using the Proscan software from the GCG package and the Prosite database are provided below.

[0187] Bacterial clones containing plasmids containing the full-length cDNAs are presently stored in the inventor's laboratories under the internal identification numbers provided. The inserts may be recovered from the deposited materials by growing an aliquot of the appropriate bacterial clone in the appropriate medium. The plasmid DNA can then be isolated using plasmid isolation procedures familiar to those skilled in the art such as alkaline lysis minipreps or large scale alkaline lysis plasmid isolation procedures. If desired the plasmid DNA may be further enriched by centrifugation on a cesium chloride gradient, size exclusion chromatography, or anion exchange chromatography. The plasmid DNA obtained using these procedures may then be manipulated using standard cloning techniques familiar to those skilled in the art. Alternatively, a PCR can be done with primers designed at both ends of the cDNA insertion. The PCR product which corresponds to the cDNA can then be manipulated using standard cloning techniques familiar to those skilled in the art.

[0188] Table I provides the sequence identification numbers of the cDNAs of the present invention, the locations of the first and last nucleotides of the full coding sequences in SEQ ID NOs: 1-405 (i.e. the nucleotides encoding both the signal peptide and the mature protein, listed under the heading FCS location in Table I), the locations of the first and last nucleotides in SEQ ID NOs: 1-405 which encode the signal peptides (listed under the heading SigPep Location in Table 1), the locations of the first and last nucleotides in SEQ ID NOs: 1-405 which encode the mature proteins generated by cleavage of the signal peptides (listed under the heading Mature Polypeptide Location in Table I), the locations in SEQ ID NOs: 1-405 of stop codons (listed under the heading Stop Codon Location in Table I), the locations of the first and last nucleotides in SEQ ID NOs: 1-405 of the polyA signals (listed under the heading Poly A Signal Location in Table I) and the locations of the first and last nucleotides of the polyA sites (listed under the heading Poly A Site Location in Table I).

[0189] Table II lists the sequence identification numbers of the polypeptides of SEQ ID NOs: 406-810, the locations of the first and last amino acid residues of SEQ ID NOs: 406-810 in the full length polypeptide (second column), the locations of the first and last amino acid residues of SEQ ID NOs: 406-810 in the signal peptides (third column), and the locations of the first and last amino acid residues of SEQ ID NOs: 406-810 in the mature polypeptide created by cleaving the signal peptide from the full length polypeptide (fourth column).

[0190] The nucleotide sequences of the sequences of SEQ ID NOs: 1-405 and the amino acid sequences encoded by SEQ ID NOs: 1-405 (i.e. amino acid sequences of SEQ ID NOs: 406-810) are provided in the appended sequence listing. In some instances, the sequences are preliminary and may include some incorrect or ambiguous sequences or amino acids. All instances of the symbol “n” in the nucleic acid sequences mean that the nucleotide can be adenine, guanine, cytosine or thymine. For each amino acid sequence, Applicants have identified what they have determined to be the reading frame best identifiable with sequence information available at the time of filing. In some instances the polypeptide sequences in the Sequence Listing contain the symbol “Xaa.” These “Xaa” symbols indicate either (1) a residue which cannot be identified because of nucleotide sequence ambiguity or (2) a stop codon in the determined sequence where applicants believe one should not exist (if the sequence were determined more accurately). Thus, “Xaa” indicates that a residue may be any of the twenty amino acids. In some instances, several possible identities of the unknown amino acids may be suggested by the genetic code.

[0191] The sequences of SEQ ID NOs: 1-405 can readily be screened for any errors therein and any sequence ambiguities can be resolved by resequencing a fragment containing such errors or ambiguities on both strands. Nucleic acid fragments for resolving sequencing errors or ambiguities may be obtained from the deposited clones or can be isolated using the techniques described herein. Resolution of any such ambiguities or errors may be facilitated by using primers which hybridize to sequences located close to the ambiguous or erroneous sequences. For example, the primers may hybridize to sequences within 50-75 bases of the ambiguity or error. Upon resolution of an error or ambiguity, the corresponding corrections can be made in the protein sequences encoded by the DNA containing the error or ambiguity. The amino acid sequence of the protein encoded by a particular clone can also be determined by expression of the clone in a suitable host cell, collecting the protein, and determining its sequence.

### EXAMPLE 15A

[0192] Categorization of cDNAs of the Present Invention

[0193] The nucleic acid sequences of the present invention (SEQ ID NOs. 1-405) were grouped based on their identity to known sequences as follows. All sequences were compared to public sequences available at the time of filing the priority applications.

[0194] In some instances, the cDNAs did not match any known vertebrate sequence nor any publicly available EST sequence, thus being completely new.

[0195] All sequences exhibiting more than 90% of identity to known sequences over at least 30 nucleotides were retrieved and further analyzed. For cDNAs referred to by their sequence identification numbers (first column), Table III gives the positions of preferred fragments within these sequences (second column entitled “Positions of preferred fragments”). Each fragment is represented by x-y where x and y are the start and end positions respectively of a given preferred fragment. Preferred fragments are separated from each other by a coma. As used herein the term “polynucleotide described in Table III” refers to the all of the preferred polynucleotide fragments defined in Table III in this manner.

[0196] For polynucleotides referred to by sequence identification numbers (first column), the second column of Table IVa provides the positions of fragments which are preferably included in the present invention (column 2) while the second column of IVb provides the positions of fragments which are preferably excluded from the present invention. Each fragment is represented by x-y where x and y are the start and end positions respectively of a given fragment. Fragments are separated from each other by a semi-column. Tables IVa and IVb provides for the inclusion and exclusion of polynucleotides in addition to those described elsewhere in the specification and is therefore, not meant as limiting description. As used herein the terms “polynucleotide described in Table IVa” and “polynucleotide described in Table UVb” refers to the all of the polynucleotide fragments defined in the second column of Tables IVa or IVb respectively in this manner.

[0197] The present invention encompasses isolated, purified, or recombinant nucleic acids which consist of, consist essentially of, or comprise a contiguous span of one of the sequences of SEQ ID Nos. 1-405 or a sequence complementary thereto, said contiguous span comprising at least 8, 10, 12, 15, 18, 20, 25, 28, 30, 35, 40, 50, 75, 100, 150, 200, 300, 400, 500, 1000 or 2000 nucleotides of the sequence of SEQ ID Nos. 1-405 or a sequence complementary thereto, to the extent that a contiguous span of these lengths is consistent with the lengths of the particular sequence, wherein the contiguous span comprises at least 1, 2, 3, 5, 10, 15, 18, 20, 25, 28, 30, 35, 40, 50, 75, 100, 150, 200, 300, 400 or 500 of a polynucleotide described in Table III or of a polynucleotide described in Table IVa, or a sequence complementary thereto. The present invention also encompasses isolated, purified, or recombinant nucleic acids comprising, consisting essentially of, or consisting of a contiguous span of at least 8, 10, 12, 15, 18, 20, 25, 28, 30, 35, 40, 50, 75, 100, 150, 200, 300, 400, 500, 1000 or 2000 nucleotides of a polynucleotide described in Table III or of a polynucleotide described in Table IVa or a sequence complementary thereto, to the extent that a contiguous span of these lengths is consistent with the length of the particular sequence described in Table III. The present invention also encompasses isolated, purified, or recombinant nucleic acids which comprise, consist of or consist essentially of a polynucleotide described in Table III or of a polynucleotide described in Table IVa, or a sequence complementary thereto. The present invention further encompasses any combination of the nucleic acids listed in this paragraph.

[0198] Cells containing the cDNAs (SEQ ID NOs: 1-405) of the present invention in the vector pBluescriptII SK− (Stratagene) are maintained in permanent deposit by the inventors at Genset, S. A., 24 Rue Royale, 75008 Paris, France.

[0199] Pool of cells containing the cDNAs of SEQ ID NOs: 1-405, from which the cells containing a particular polynucleotide is obtainable, were deposited with the European Collection of Cell Cultures (ECACC), Vaccine Research and Production Laboratory, Public Health Laboratory Service, Centre for Applied Microbiology and Reasearch, Porton Down, Salisbury, Wiltshire SP4 OJG, United Kingdom. Each cDNA clone has been transfected into separate bacterial cells (E-coli) for these composite deposits. In particular, cells containing the sequences of SEQ ID NOs: 2-17 and 19-23 were deposited on Jun. 17, 1999 in the pool having ECACC Accession No. 99061735 and designated SignalTag 15061999. In addition, cells containing the sequences of SEQ ID Nos: 24-50 were deposited on Dec. 18, 1998, in the pool having ECACC Accession No. 98121805 and designated SignalTag 166-191. Table IV provides the internal designation number assigned to each SEQ ID NO. and indicates whether the sequence is a nucleic acid sequence or a protein sequence.

[0200] Each cDNA can be removed from the Bluescript vector in which it was deposited by performing a BsH II double digestion to produce the appropriate fragment for each clone provided the cDNA clone sequence does not contain this restriction site. Alternatively, other restriction enzymes of the multicloning site of the vector may be used to recover the desired insert as indicated by the manufacturer.

[0201] Bacterial cells containing a particular clone can be obtained from the composite deposit as follows:

[0202] An oligonucleotide probe or probes should be designed to the sequence that is known for that particular clone. This sequence can be derived from the sequences provided herein, or from a combination of those sequences. The design of the oligonucleotide probe should preferably follow these parameters:

[0203] (a) It should be designed to an area of the sequence which has the fewest ambiguous bases (“N's”), if any;

[0204] (b) Preferably, the probe is designed to have a Tₘ of approx. 80° C. (assuming 2 degrees for each A or T and 4 degrees for each G or C). However, probes having melting temperatures between 40° C. and 80° C. may also be used provided that specificity is not lost.

[0205] The oligonucleotide should preferably be labeled with (−[³²P]ATP (specific activity 6000 Ci/mmole) and T4 polynucleotide kinase using commonly employed techniques for labeling oligonucleotides. Other labeling techniques can also be used. Unincorporated label should preferably be removed by gel filtration chromatography or other established methods. The amount of radioactivity incorporated into the probe should be quantified by measurement in a scintillation counter. Preferably, specific activity of the resulting probe should be approximately 4×10⁶ dpm/pmole.

[0206] The bacterial culture containing the pool of full-length clones should preferably be thawed and 100 μl of the stock used to inoculate a sterile culture flask containing 25 ml of sterile L-broth containing ampicillin at 100 μg/ml. The culture should preferably be grown to saturation at 37° C., and the saturated culture should preferably be diluted in fresh L-broth. Aliquots of these dilutions should preferably be plated to determine the dilution and volume which will yield approximately 5000 distinct and well-separated colonies on solid bacteriological media containing L-broth containing ampicillin at 100 μg/ml and agar at 1.5% in a 150 mm petri dish when grown overnight at 37° C. Other known methods of obtaining distinct, well-separated colonies can also be employed.

[0207] Standard colony hybridization procedures should then be used to transfer the colonies to nitrocellulose filters and lyse, denature and bake them.

[0208] The filter is then preferably incubated at 65° C. for 1 hour with gentle agitation in 6×SSC (20× stock is 175.3 g NaCl/liter, 88.2 g Na citrate/liter, adjusted to pH 7.0 with NaOH) containing 0.5% SDS, 100 pg/ml of yeast RNA, and 10 mM EDTA (approximately 10 ml per 150 mm filter). Preferably, the probe is then added to the hybridization mix at a concentration greater than or equal to 1×10⁶ dpm/ml. The filter is then preferably incubated at 65° C. with gentle agitation overnight. The filter is then preferably washed in 500 ml of 2×SSC/0.1% SDS at room temperature with gentle shaking for 15 minutes. A third wash with 0.1×SSC/0.5% SDS at 65° C. for 30 minutes to 1 hour is optional. The filter is then preferably dried and subjected to autoradiography for sufficient time to visualize the positives on the X-ray film. Other known hybridization methods can also be employed.

[0209] The positive colonies are picked, grown in culture, and plasmid DNA isolated using standard procedures. The clones can then be verified by restriction analysis, hybridization analysis, or DNA sequencing.

[0210] The plasmid DNA obtained using these procedures may then be manipulated using standard cloning techniques familiar to those skilled in the art. Alternatively, a PCR can be done with primers designed at both ends of the cDNA insertion. The PCR product which corresponds to the cDNA can then be manipulated using standard cloning techniques familiar to those skilled in the art.

[0211] Tissue expression of the cDNAs of the present invention was also examined. Table VI list the Genset's libraries of tissues and cell types examined that express the polynucleotides of the present invention. The tissues and cell types examined for polynucleotide expression were: brain, fetal brain, fetal kidney, fetal liver, pituitary gland, liver, placenta, prostate, salivary gland, stomach/intestine, and testis. For cDNAs referred to by sequence identification number (first column), the number of proprietary 5′ESTs expressed in a particular tissue referred to by its name is indicated in parentheses (second column). In addition, the bias in the spatial distribution of the polynucleotide sequences of the present invention is indicated in Table VII. The expression of these sequences were examined by comparing the relative proportions of the biological polynucleotides of a given tissue using the following statistical analysis. The under- or over-representation of a polynucleotide of a given cluster in a given tissue was performed using the normal approximation of the binomial distribution. When the observed proportion of a polynucleotide of a given tissue in a given consensus had less than 1% chance to occur randomly according to the chi2 test, the frequency bias was reported as “preferred”. The results are given in Table VII as follows. For some polynucleotides showing a bias in tissue distribution as referred to by sequence identification number in the first column, the list of tissues where the polynucleotides are over-represented is given in the second column entitled “preferential expression”.

[0212] In addition, the spatial distribution of the polynucleotide sequences of the present invention was investigated using information from public databases. The expression of the sequences of SEQ ID NOs:1-405 was examined by comparing them to the polynucleotide sequences in public databases. Table VIII lists tissues and cell types which express the polynucleotides of the sequence listing. Column one lists the sequence identification number and column two lists the corresponding tissues and cell types that were found to express the polynucleotide sequences using information from public databases. The number to the right of the tissue or cell type in column two represents the number of entries in the databases listing that tissue or cell type as expressing the sequence of column 1.

[0213] In one embodiment, polynucleotides of the invention selectively expressed in tissues may be used as markers to identify these tissues using any technique known to those skilled in the art those skilled in the art such as in situ PCR. Such tissue-specific markers may then be used to identify tissues of unknown origin, for example, forensic samples, differentiated tumor tissue that has metastasized to foreign bodily sites, or to differentiate different tissue types in a tissue cross-section using immunochemistry. For example, polynucleotides of the invention preferentially expressed in given tissues as indicated in Table VII may be used for this purpose. In addition, the polynucleotide of SEQ ID NO: 16 may be used to selectively identify liver tissue. The polynucleotide of SEQ ID NO:29 may be used to selectively identify prostate tissue. The polynucleotides of SEQ ID NO:21, 23 and 49 may be used to selectively identify normal or diseased brain tissue.

### EXAMPLE 15B

[0214] Functional Analysis of Predicted Protein Sequences

[0215] Following double-sequencing, contigated sequences were assembled for each of the cDNAs of the present invention and further reanalyzed. The following databases were used in sequence analyses: Genbank (release 117), EMBL (release 62), TrEmbl (release 13.4) Genseq (release 0011) Swissprot (release 38), PIR (release 64). In some cases, more preferred open reading frames differing from the ones previously selected in priority applications are indicated.

[0216] The polypeptides (SEQ ID NOs: 406-810) encoded by the cDNAs were screened for the presence of known structural or functional motifs or for the presence of signatures, small amino acid sequences that are well conserved amongst the members of a protein family. The search was conducted on the Pfam 5.2 database using HMMER-2.1.1 (for info see Sonnhammer et Durbin, http:/www.sanger.ac.uk/Pfam/), on the BLOCKSPLUS v 11.0 database using emotif (for info see Nevill-Manning et al., PNAS, 95, 5865-5871, (1998), http://motif.stanford/edu/EMOTIF) and on the Prosite 15.0 database using bla (Tatusov, R. L. & Koonin, E. V. CABIOS 10, No. 4) and pfscan (http://www.isrec.isb-sib.ch/cgi-bin/man.cgi?section=1 &topic=pfscan).

[0217] It should be noted that, in the numbering of amino acids in the protein sequences discussed below, and in Table IX, the first methionine encountered is designated as amino acid number 1, i.e.; the leader sequence is not numbered negatively. In the appended sequence listing, the first amino acid of the mature protein resulting from cleavage of the signal peptide is designated as amino acid number 1 and the first amino acid of the signal peptide is designated with the appropriate negative number, in accordance with the regulations governing sequence listings. Each of the references cited in this example are hereby incorporated by reference in their entireties.

[0218] Table IX lists known biologically structural and functional domains for the cDNA of the present invention corresponding to the sequence identification number indicated in the first column. Column 2 lists the positions of the domains where each domain is represented by x-y where x and y are the start and end positions respectively of a given domain. Column 3 lists the domain designation. Column 4 lists the database from which the domain was identified.

[0219] Protein of SEQ ID NO: 425 (Internal Designation 117-007-2-0-C4-FLC)

[0220] The protein of SEQ ID NO: 425 encoded by the cDNA of SEQ ID NO:20 found in liver is homologous to a human protein thought to be transmembraneous (Genseq accession number W88491). In addition, this protein displays homology to alpha-2-HS glycoprotein precursors (fetuins) of human and pigs. The 382-amino-acid-long protein of SEQ ID NO: 425, which is similar in size to fetuins, displays pfam cystatin domains 1 and 2 from positions 37 to 104 and from positions 157 to 254. It also displays the 12 conserved cysteines of this family (positions 36, 93, 104, 117, 137, 151, 154, 216, 224, 237, 254 and 368) and a conserved region around the second cysteine (positions 89 to 96). In addition, the potential active site QxVxG is also present in the protein of the invention (positions 198 to 202).

[0221] Mammalian fetuins are secreted glycoproteins synthesized in liver and selectively concentrated in bone matrix. Their functions include control of endocytosis, cell proliferation and differentiation, immune response, bone formation and resorption, and apoptosis. More specifically, fetuin levels in human plasma are regulated in the manner of a negative acute phase reactant (Lebreton et al., J. Clin. Invest. 64:1118-29 (1979)) and serum levels decline in some cancer patients correlating with impaired cellular immune function (Baskies et al., Cancer 45:3050-58 (1980)). During mouse embryogenesis, fetuin mRNA is expressed in a number of developing organs and tissues including the heart, kidney, lung, nervous system and liver (Yang et al., Biochem. Biophysic. Acta 1130:149-56 (1992)). Mammalian fetuin present in sub-populations of neurons in the developing central and peripheral nervous system is associated to cell survival (Saunders et al., Anat. Embryol 186:477-86 (1992)); Kitchener et al., Int J. Dev. Neurosci. 15:717-27 (1997)). Fetuin is able to promote growth in tissue culture (Puck et al. Proc. Natl. Acad. Sci. U. S. A., 59:192-99 (1968)), to enhance bone resorption (Coclasure et al., J. Clin. Endocrinol. Metab. 66:187-192 (1988)) and to stimulate adipogenesis in cell culture models (Cayatte et al., J. Biol. Chem. 265:5883-8 (1990)). Abnormal serum levels of fetuin are associated with alteration in cellular and biochemical properties of bone, Paget's disease, reduced bone quality and osteogenesis imperfecta (for a review see Binkert et al, J. Biol. Chem. 274:28514-20 (1999)). Part of the fetuin activities has been shown to depend upon their ability to inhibit the activity of TGF-beta cytokines and bone morphogenetic proteins (BMPs) through direct binding (Demetriou et al., J. Biol. Chem. 271:12755-61 (1996); Binkert et al., J. Biol. Chem. 274:28514-20 (1999)). These ligands are members of the TGF-beta superfamily comprising proteins belonging to the TGF-beta, activin/inhibin, DPP/VG1, and Mullerian Inhibiting Substance Family families mediating a wide range of biological processes in vertebrates and invertebrates, including regulation of cell proliferation, differentiation, recognition, and death, and thus play a major role in developmental processes, tissue recycling, and repair (J. Wrana and L. Attisano, “Mad-related Proteins in TGF-beta Signaling,” TIG 12:493-496, 1996; U.S. Pat. No. 5,981,483). In addition, fetuins are members of the cystatin superfamily which contains evolutionarily related proteins with diverse functions such as cysteine protease inhibitors, stefins, fetuins and kininogens (see review by Brown and Dziegielewska, Prot. Science, 6:5-12 (1997)).

[0222] It is believed that the protein of SEQ ID NO: 425 or part thereof is a member of the cystatin superfamily and, as such, plays a role in cellular proteolysis, endocytosis, cell proliferation and differentiation, immune response, bone formation and resorption, and/or apoptosis. Preferred polypeptides of the invention are polypeptides comprising the amino acids of SEQ ID NO:425 from positions 37 to 104, 89 to 96, 157 to 254, 198 to 202, and 36 to 368. Other preferred polypeptides of the invention are fragments of SEQ ID NO:425 having any of the biological activity described herein.

[0223] An embodiment of the present invention relates to methods of using the protein of the invention or part thereof to identify and/or quantify cytokines of the TGF-beta superfamily, more preferably TGF-1beta, TGF-2beta and BMP-2, BMP-4 and BMP-6 in a biological sample, and thus used in assays and diagnostic kits for the quantification of such cytokines in bodily fluids, in tissue samples, and in mammalian cell cultures. The binding activity of the protein of the invention or part thereof may be assessed using the assay described in Demetriou et al., J. Biol. Chem. 271:12755-61 (1996) or any other method familiar to those skilled in the art. Preferably, a defined quantity of the protein of the invention or part thereof is added to the sample under conditions allowing the formation of a complex between the protein of the invention or part thereof and the cytokine to be identified and/or quantified. Then, the presence of the complex and/or or the free protein of the invention or part thereof is assayed and eventually compared to a control using any of the techniques known by those skilled in the art.

[0224] Another embodiment of the invention relates to compositions and methods using the protein of the invention or part thereof to modulate the activity of members of the TGF beta superfamily, preferably members of TGF beta family, members of actin/inhibin family, members of DPP/VG1 family, and members of Mullerian inhibiting substance family, more preferably TGF-1beta, TGF-2beta, BMP-2, BMP-4 and BMP-6, in contexts where the production of such proteins is undesirable.

[0225] In a preferred embodiment, the protein of the invention or part thereof is used to inhibit and/or attenuate the effects of cytokines belonging to the TGF beta family, such as TGF-1beta, TGF-2beta and BMP-2, BMP-4 and BMP-6, by blocking the binding of endogenous cytokines to its natural receptor, thereby blocking cell proliferative or inhibitory signals generated by the ligand-receptor binding event. The protein of the invention or part thereof would thereby stimulate immune responses and reduce the deposition of extracellular matrix. Accordingly, the protein of the invention or part thereof, would be particularly suitable for the treatment of conditions such as fibrosis including pulmonary fibrosis, fibrosis associated with chronic liver disease, hepatic veno-occlusive and idiopathic interstitial pneumonitis, kidney disease, and radiotherapy or radiation accidents; proliferative vitreoretinopathy; systemic sclerosis; autoimmune disorders such as rheumatoid arthritis, Graves disease, systemic lupus erythematosus, Wegener's granulomatosis, sarcoidosis, polyarthritis, pemphigus, pemphigoid, erythema multiform, Sjogren's syndrome, inflammatory bowel disease, multiple sclerosis, myasthenia gravis keratitis, scleritis, Type I diabetes, insulin-dependent diabetes mellitus, Lupus Nephritis, and allergic encephalomyelitis; proliferative disorders including various forms of cancer such as leukemias, lymphomas (Hodgkins and non-Hodgkins), sarcomas, melanomas, adenomas, carcinomas of solid tissue, hypoxic tumors, squamous cell carcinomas of the mouth, throat, larynx, and lung, genitourinary cancers such as cervical and bladder cancer, hematopoietic cancers, head and neck cancers, and nervous system cancers, benign lesions such as papillomas, atherosclerosis, angiogenesis, and viral infections, in particular HIV infections. The protein of the invention or part thereof may also be used, as an antagonist of cytokines of the TGF-beta family, to elevate blood pressure through the inhibition of hypotension induced by TGF-beta. Methods which lower and/or maintain the level of circulating TGF-beta in a subject may result in a similar pressor effect and may prevent excessive hypotensive signal generation and resulting hypotension.

[0226] In another preferred embodiment, the protein of the invention or part thereof is used to block the normal interaction between activin and its receptor. The protein of the invention or part thereof would thereby stimulate the release of FSH. Accordingly, the protein of the invention or part thereof can be applied to the control of fertility in humans, domesticated animals, and animals of commercial interest. The action of activin on erythropoiesis can also be modulated by administering a modulating effective amount of the protein of the invention or part thereof. Thus, the protein of the invention or part thereof may be used in the diagnosis and/or treatment of activin-dependent tumors or for enhancing the survival of brain neurons.

[0227] In still another preferred embodiment, the protein of the invention or part thereof is used to modulate bone formation and bone cell differentiation through binding to bone morphogenetic proteins and/or to TGF-beta proteins. Therefore, the protein of the invention or part thereof may be used to repair or heal fractures, treat osteoporosis, address dental problems, and with implants to encourage bone growth. In addition, the protein of the invention or part thereof may be used in disorders where there is too much bone formation (for example, achondroplasia, Paget's disease, and osteoporosis). The utility of the protein of the invention or part thereof may be further confirmed using binding assays and animal models described in Demetriou et al., J. Biol. Chem. 271:12755-61 (1996) and in U.S. Pat. No. 5,981,483.

[0228] In still another embodiment, the invention relates to methods and compositions containing the protein of the invention or part thereof to treat and/or prevent the ill-effects of bacterial infection during pregnancy in mammals, such as spontaneous abortion and maternal death. In a preferred embodiment, the protein of the invention may be used to counteract the effects of the bacterial endotoxin lipopolysaccharide (LPS). The method to use such compositions is described in Dziegielewska and Andersen, Biol. Neonate, 74:372-5 (1998).

[0229] In another series of embodiments, the protein of the invention, or part thereof may be used to inhibit proteases, preferably cysteine proteases. Examples of cysteine proteases that may be inhibited by the protein of the invention or part thereof include, but are not limited to, the plant cysteine proteases such as papain, ficin, aleurain, oryzain and actinidin; mammalian cysteine proteases such as cathepsins B, H, J, L, N, S, T, 0, 02 and C, (cathepsin C is also known as dipeptidyl peptidase I), interleukin converting enzyme (ICE), calcium-activated neutral proteases, calpain I and II; bleomycin hydrolase, viral cysteine proteases such as picomian 2A and 3C, aphthovirus endopeptidase, cardiovirus endopeptidase, comovirus endopeptidase, potyvirus endopeptidases I and II, adenovirus endopeptidase, the two endopeptidases from chestnut blight virus, togavirus cysteine endopeptidase, as well as cysteine proteases of the polio and rhinoviruses; and cysteine proteases known to be essential for parasite lifecycles, such as the proteases from species of Plasmodia, Entamoeba, Onchocera, Trypanosoma, Leishmania, Haemonchus, Dictyostelium, Therileria, and Schistosoma, such as those associated with malaria (P. falciparum), trypanosomes (T. cruzi, the enzyme is also known as cruzain or cruzipain), murine P. vinckei, and the C. elegans cysteine protease. For an extensive listing of cysteine proteases that may be inhibited by the protein or part thereof of the present invention, see Rawlings et al., Biochem. J. 290:205-218 (1993). Assays for testing the inhibitory activities of cysteine protease inhibitors are presented in the U.S. Pat. No. 5,973,110, using methods for determining inhibition constants well known to those skilled in the art (see Fersht, ENZYME STRUCTURE AND MECHANISM, 2nd ed., W.H. Freeman and Co., New York, (1985)).

[0230] Since proteases play an important role in the regulation of many biological processes in virtually all living organisms as well as a major role in diseases, the protein of the invention or part thereof are useful in a wide variety of applications, such as those described in U.S. Pat. No. 6,004,933.

[0231] An embodiment of the present invention further relates to methods of using the protein of the invention or part thereof to quantify the amount of a given protease in a biological sample, and thus used in assays and diagnostic kits for the quantification of proteases in bodily fluids or other tissue samples, in addition to bacterial, fungal, plant, yeast, viral or mammalian cell cultures. In a preferred embodiment, the sample is assayed using a standard protease substrate. A known concentration of protease inhibitor is added, and allowed to bind to a particular protease present. The protease assay is then rerun, and the loss of activity is correlated to the protease inhibitor activity using techniques well known to those skilled in the art.

[0232] In addition, the protein of the invention or part thereof may be useful to remove, identify or inhibit contaminating proteases in a sample. Compositions comprising the polypeptides of the present invention may be added to biological samples as a “cocktail” with other protease inhibitors to prevent degradation of protein samples. The advantage of using a cocktail of protease inhibitors is that one is able to inhibit a wide range of proteases without knowing the specificity of any of the proteases. Using a cocktail of protease inhibitors also protects a protein sample from a wide range of future unknown proteases which may contaminate a protein sample from a vast number of sources. Such protease inhibitor cocktails (see for example the ready to use cocktails sold by Sigma) are widely used in research laboratory assays to inhibit proteases susceptible of degrading a protein of interest for which the assay is to be performed. For example, the protein of the invention or part thereof is added to samples where proteolytic degradation by contaminating proteases is undesirable. Alternatively, the protein of the invention or part thereof may be bound to a chromatographic support, either alone or in combination with other protease inhibitors, using techniques well known in the art, to form an affinity chromatography column. A sample containing the undesirable protease is run through the column to remove the protease. Alternatively, the same methods may be used to identify new proteases.

[0233] In a preferred embodiment, the protein of the invention or part thereof may be used to inhibit proteases implicated in a number of diseases where cellular proteolysis occur. In particular, the protein of the invention or part thereof may be useful to inhibit lysosomal cysteine proteases, both in vivo or in vitro, implicated in a wide spectrum of diseases characterized by tissue degradation including but not limited to arthritis, muscular dystrophy, inflammation, tumor invasion, glomerulonephritis, parasite-borne infections, Alzheimer's disease, periodontal disease, and cancer metastasis.

[0234] In another preferred embodiment, the protein of the invention or part thereof may be used to inhibit exogenous proteases, both in vivo or in vitro, implicated in a number of infectious diseases including but not limited to gingivitis, malaria, leishmaniasis, filariasis, osteoporosis and osteoarthritis, and other bacterial, and parasite-borne or viral infections. In particular, the protein of the invention or part thereof may offer applications in viral diseases where the proteolysis of primary polypeptide precursors is essential to the replication of the virus, as for HIV and HCV.

[0235] In another preferred embodiment, the protein of the invention or part thereof is used to prevent cells to undergo apoptosis. In a preferred embodiment, the apoptosis active polypeptide is added to an in vitro culture of mammalian cells in an amount effective to reduce apoptosis. For example, inhibiting the activity of apopain, a cysteine protease member of the ICE/CED-3 subfamily involved in apoptosis, attenuates apoptosis in vitro (U.S. Pat. No. 5,798,442). Furthermore, the protein of the invention or part thereof may be useful in the diagnosis, the treatment and/or the prevention of disorders in which apoptosis is deleterious, including but not limited to immune deficiency syndromes (including AIDS), type I diabetes, pathogenic infections, cardiovascular and neurological injury, alopecia, aging, Parkinson's disease and Alzheimer's disease.

[0236] Additionally, the protein of the invention or part thereof offer application in the treatment of inflammation and immune based disorders of the lung, airways, central nervous system and surrounding membranes, eyes, ears, joints, bones, connective tissues, cardiovascular system including the pericardium, gastrointestinal and urogenital systems, the skin and the mucosal membranes. These conditions include infectious diseases where active infection exists at any body site, such as meningitis and salpingitis; complications of infections including septic shock, disseminated intravascular coagulation, and/or adult respiratory distress syndrome; acute or chronic inflammation due to antigen, antibody and/or complement deposition; inflammatory conditions including arthritis, chalangitis, colitis, encephalitis, endocarditis, glomerulonephritis, hepatitis, myocarditis, pancreatitis, pericarditis, reperfusion injury and vasculitis. Immune-based diseases include but are not limited to conditions involving T-cells and/or macrophages such as acute and delayed hypersensitivity, graft rejection, and graft-versus-host disease; auto-immune diseases including Type I diabetes mellitus and multiple sclerosis. Bone and cartilage reabsorption as well as diseases resulting in excessive deposition of extracellular matrix such as interstitial pulmonary fibrosis, cirrhosis, systemic sclerosis, and keloid formation may also be treated with the protein of the invention or part thereof.

[0237] Furthermore, the protein of the present invention or part thereof find use in drug potentiation applications. For example, therapeutic agents such as antibiotics or antitumor drugs can be inactivated through proteolysis by endogenous proteases, thus rendering the administered drug less effective or inactive. Accordingly, the protein of the invention or part thereof may be administered to a patient in conjunction with a therapeutic agent in order to potentiate or increase the activity of the drug. This co-administration may be by simultaneous administration, such as a mixture of the protease inhibitor and the drug, or by separate simultaneous or sequential administration.

[0238] In addition, protease inhibitors have been shown to inhibit the growth of microorganisms including human pathogenic bacteria. For example, protease inhibitors are able to inhibit growth of all strains of group A streptococci, including antibiotic-resistant strains (Merigan, T. et al (1996) Ann Intern Med 124:1039-1050; Stoka, V. (1995) FEBS. Lett 370:101-104; Vonderfecht, S. et al (1988) J Clin Invest 82:2011-2016; Collins, A. et al (1991) Antimicrob Agents Chemother 35:2444-2446). Accordingly, the protein of the invention may or part thereof be used as antibacterial agents to retard or inhibit the growth of certain bacteria either in vitro or in vivo. Particularly, the polypeptides of the present invention may be used to inhibit the growth of group A streptococci on non-living matter such as instruments not conducive to other methods of preventing or removing contamination by group A streptococci, and in culture of living plant, fungi, and animal cells.

[0239] Protein of SEQ ID NO: 418 (Internal Designation 116-054-3-0-G12-FLC)

[0240] The protein of SEQ ID NO: 418 encoded by the cDNA of SEQ ID NO: 13 found in liver is homologous to the subunit 2 of NADH dehydrogenase (Genseq accession number Y14556) 35 and to the MLRQ subunit of NADH dehydrogenase (NADH-ubiquinone oxidoreductase, NADH-D or complex I) of bovine, murine and human species (Genbank accession numbers X64897, U59509 and EMBL accession number U94586 respectively). In addition, the 83-amino-acid-long protein of SEQ ID NO: 418 has a size similar to those of known MLRQ subunits as well as an hydrophobic N-terminal region of 25-30 amino acids.

[0241] Complex I is the first of 3 multienzyme complexes located in the mitochondrial membrane that make up the mitochondrial electron transport chain. Complex I accomplishes the first step in this process by accepting electrons from NADH and passing them through a flavin molecule to ubiquinone which then transfers electrons to the second enzyme complex in the chain.

[0242] Complex I contains approximately 40 polypeptide subunits of widely varying size and composition and is highly conserved in a variety of mammalian species including rat, rabbit, cow, and human (Cleeter, M. W. J. and Ragan, C. I. (1985) Biochem. J. 230: 739-46). The best characterized complex I is from bovine heart mitochondria and is composed of 41 polypeptides (Walker, J. E. et al. (1992) J. Mol. Biol. 226: 1051-72). Seven of these polypeptides are encoded by mitochondrial DNA, while the remaining 34 are nuclear gene products that are imported into the mitochondria. Six of these imported polypeptides are characterized by N-terminal signal peptide sequences which target these polypeptides to the mitochondria and are then cleaved from the mature proteins. A second group of polypeptides lack N-terminal targeting sequences and appear to contain import signals which lie within the mature protein (Walker et al., supra). The functions of many of the individual subunits in NADH-D are largely unknown. The 24-, 51-, and 75-kDa subunits have been identified as being catalytically important in electron transport, with the 51-kDa subunit forming part of the NADH binding site and containing the flavin moiety that is the initial electron acceptor (Ali, S. T. et al. (1993) Genomics 18:435-39). The location of other functionally important groups, such as the electron-carrying iron-sulfate centers, remains to be determined. Many of the smaller subunits (<30 kDa) contain hydrophobic sequences that may be folded into membrane spanning alpha-helices. These subunits presumably are anchored into the inner membrane of the mitochondria and interact via more hydrophilic parts of their sequence with globular proteins in the large extrinsic domain of NADH-D. The remaining proteins are likely to be globular and form part of a domain outside the lipid bilayer. The MLRQ subunit is one of the small (9 kDa) subunits that is nuclear encoded and contains no N-terminal extension to direct the protein into the mitochondrion, thus implying that the import signal should lie into the mature protein (Walker et al. supra). A potential membrane-spanning alpha-helix presumably anchors the MLRQ subunit to the inner membrane of the mitochondria, but the precise function of the subunit is unknown.

[0243] Mitochondriocytopathies due to complex I deficiency are frequently encountered and affect tissues with a high-energy demand such as brain (mental retardation, convulsions, movement disorders), heart (cardiomyopathy, conduction disorders), kidney (Fanconi syndrome), skeletal muscle (exercise intolerance, muscle weakness, hypotonia) and/or eye (opthmaloplegia, ptosis, cataract and retinopathy). Complex I is also thought to play a role in the regulation of apoptosis and necrosis. For a review on complex I, see Smeitink et al., Hum. Mol. Gent., 7: 1573-1579 (1998); Lenaz et al., Acta Biochem Pol 46:1-21 (1999); Lee and Wei, J Biomed Sci 7:2-15 (2000). In addition, defects and altered expression of complex I are associated with a variety of disease conditions in man, including neurodegenerative diseases, myopathies, and cancer (Singer, T. P. et al. (1995) Biochim. Biophys. Acta 1271:211-19; Selvanayagam, P. and Rajaraman, S. (1996) Lab. Invest. 74:592-99). Moreover, NADH-D reduction of the quinone moiety in chemotherapeutic agents such as doxorubicin is believed to contribute to the antitumor activity and/or mutagenicity of these drugs (Akman, S. A. et al. (1992) Biochemistry 31:3500-6).

[0244] It is believed that the protein of SEQ ID NO: 418 is a NADH-ubiquinone oxidoreductase MLRQ-like protein and/or plays a role in mitochondria electron transport. Preferred polypeptides of the invention are fragments of SEQ ID NO: 443 having any of the biological activities described herein

[0245] An object of the present invention are compositions and methods of targeting heterologous compounds, either polypeptides or polynucleotides to mitochondria by recombinantly or chemically fusing a fragment of the protein of the invention to an heterologous polypeptide or polynucleotide. Preferred fragments are signal peptide, amphiphilic alpha helices and/or any other fragments of the protein of the invention, or part thereof, that may contain targeting signals for mitochondria including but not limited to matrix targeting signals as defined in Herrman and Neupert, Curr. Opinion Microbiol. 3:210-4 (2000); Bhagwat et al. J. Biol. Chem. 274:24014-22 (1999), Murphy Trends Biotechnol. 15:326-30 (1997); Glaser et al. Plant Mol Biol 38:311-38 (1998); Ciminale et al. Oncogene 18:4505-14 (1999). Such heterologous compounds may be used to modulate mitochondria's activities. For example, they may be used to induce and/or prevent mitochondrial-induced apoptosis or necrosis. In addition, heterologous polynucleotides may be used for mitochondrial gene therapy to replace a defective mitochondrial gene and/or to inhibit the deleterious expression of a mitochondrial gene.

[0246] In another embodiment, the protein of the invention or part thereof is used to prevent cells to undergo apoptosis. In a preferred embodiment, the apoptosis active polypeptide is added to an in vitro culture of mammalian cells in an amount effective to reduce apoptosis. Furthermore, the protein of the invention or part thereof may be useful in the diagnosis, the treatment and/or the prevention of disorders in which apoptosis is deleterious, including but not limited to immune deficiency syndromes (including AIDS), type I diabetes, pathogenic infections, cardiovascular and neurological injury, alopecia, aging, degenerative diseases such as Alzheimer's Disease, Parkinson's Disease, Huntington's disease, dystonia, Leber's hereditary optic neuropathy, schizophrenia, and myodegenerative disorders such as “mitochondrial encephalopathy, lactic acidosis, and stroke” (MELAS), and “myoclonic epilepsy ragged red fiber syndrome” (MERRF).

[0247] The invention further relates to methods and compositions using the protein of the invention or part thereof to diagnose, prevent and/or treat several disorders in which mitochondrial respiratory electron transport chain is impaired, or needs to be impaired, including but not limited to mitochondriocytopathies, necrosis, aging, neurodegenerative diseases, myopathies, and cancer. For diagnostic purposes, the expression of the protein of the invention could be investigated using any of the Northern blotting, RT-PCR or immunoblotting methods described herein and compared to the expression in control individuals. For prevention and/or treatment purposes, the protein of the invention may be used to enhance electron transport and increase energy delivery using any of the gene therapy methods described herein or known to those skilled in the art.

[0248] Moreover, antibodies to the protein of the invention or part thereof may be used for detection of mitochondria organelles and/or mitochondrial membranes using any techniques known to those skilled in the art.

[0249] Protein of SEQ ID NO: 443 (Internal Designation 108-013-5-0-H9-FL)

[0250] The protein of SEQ ID NO: 443 encoded by the extended cDNA SEQ ID NO:38 is homologous to the human IHLP lysophospholipase (Genseq accession number W88457) and to a family of lysophospholipases conserved among eukaryotes (yeast, rabbit, rodents and human). In addition, some members of this family (rat:Genbank accession number U97146, rabbit: Genbank accession number U97147) exhibit a calcium-independent phospholipase A2 activity (Portilla et al, J. Am. Soc. Nephro., 9:1178-1186 (1998)). All members of this family exhibit the active site consensus GXSXG motif of carboxylesterases that is also found in the protein of the invention (position 54 to 58). The protein of the invention also exhibits an emotif alpha/beta hydrolase fold signature from positions 52 to 66. In addition, this protein may be a membrane protein with one transmembrane domain as predicted by the software TopPred II (Claros and von Heijne, CABIOS applic. Notes, 10:685-686 (1994)).

[0251] Lysophospholipids are found in very low concentrations in biological membranes. Higher concentrations of lysophospholipids have been shown to disturb membrane conformation, affect the activities of many membrane-bound enzymes and may even lead to cell lysis. In addition, increased lysophospholipid levels were observed in atherosclerosis, inflammation, hyperlipidemia, lethal dysrhythmias in myocardial ischemia and segmental demyelination of peripheral nerves. Some lysophospholipids, such as lysophosphatidylcholine, may act as lipid second messengers, transducing signals eliciting from membrane receptors. They may also potentiate immune responses and exhibit anti-tumor effects as bactericidal activities (for a review see Wang and Dennis, Biochim Biophys Acta; 1439:1-16 (1999)).

[0252] Lysophospholipase is a widely distributed enzyme which regulates the level of lysophospholipids and occurs in numerous isoforms. These isoforms vary in molecular mass, substrate metabolized, and optimum pH required for activity. Small isoforms, approximately 15-30 kDa, function as hydrolases; large isoforms, those exceeding 60 kDa function both as transacylases and hydrolases. Lysophospholipases are regulated by lipid factors such as acylcamitine, arachidonic acid and phosphatidic acid. The expression of IHLP is associated with proliferation and differentiation of cells of the immune system.

[0253] The role of lysophospholipases in human tissues has been investigated in various research studies. Selle, H. et al. (1993; Eur. J. Biochem. 212:411-16) characterized the role of lysophopholipase in the hydrolysis of lysophosphatidylcholine which causes lysis in erythrocyte membranes. Similarly, Endresen, M. J. et al. (1993) Scand. J. Clin. Invest. 53:733-9 reported that the increased hydrolysis of lysophosphatidylcholine by lysophopholipase in pre-eclamptic women causes release of free fatty acids into the sera. In renal studies, lysophopholipase was shown to protect NA+,K+-ATPase from the cytotoxic and cytolytic effects of cyclosporin A (Anderson, R. et al. (1994) Toxicol. Appl. Pharmacol. 125:176-83).

[0254] It is believed that the protein of SEQ ID NO:443 or part thereof plays a role in fatty acid metabolism, probably as a phospholipase. Preferred polypeptides of the invention are polypeptides comprising the amino acids of SEQ ID NO:443 from positions 54 to 58, and 52 to 66. Other preferred polypeptides of the invention are fragments of SEQ ID NO:443 having any of the biological activities described herein. The hydrolytic activity of the protein of the invention or part thereof may be assayed using any of the assays known to those skilled in the art including those described in Portilla et al., J Am Soc Nephrol; 9:1178-1186 (1998) and in the U.S. Pat. No. 6,004,792.

[0255] The invention relates to methods and compositions using the protein of the invention or part thereof to hydrolyze one or several substrates, alone or in combination with other substances. Such substrates are glycerophospholipids, preferably containing an acyl ester bond at the sn-2 position, more preferably lysophosphatidylcholine, lysophosphatidylinositol, lysophosphatidylserine, 1-oleoyl-2-acetyl-sn-glycero-3-phosphocholine, lecithin and lysolecithin. For example, the protein of the invention or part thereof is added to a sample containing the substrate(s) in conditions allowing hydrolysis, and allowed to catalyze the hydrolysis of the substrate(s). In a preferred embodiment, the hydrolysis is carried out using a standard assay such as those described by Portilla et al., supra and in the U.S. Pat. No. 6,004,792.

[0256] In a preferred embodiment, the protein of the invention or part thereof may be used to hydrolyze undesirable phospholipids, both in vitro or in vivo. In particular, the protein of the invention or part thereof may be used as a food additive to improve fat digestibility and to promote growth in animals using methods described in U.S. Pat. No. 6,017,530. In another preferred embodiment, the protein of the invention or part thereof may be used to improve the filtration of starch syrup by hydrolyzing the turbidity consisting mainly from phospholipids and resulting from the production of highly concentrated solutions of glucose isomers using methods described in U.S. Pat. No. 5,965,422. In addition, the protein of the invention or part thereof may be used in an enzymatic degumming process to free vegetable oils from phospholipids in order to allow their refining using methods described in U.S. Pat. No. 6,001,640. In another preferred embodiment, compositions comprising the protein of the present invention or part thereof are added to samples as a “cocktail” with other hydrolytic enzymes, such as other phospholipases for example to improve feed utilization in animals (see U.S. Pat. No. 6,017,530). The advantage of using a cocktail of hydrolytic enzymes is that one is able to hydrolyze a wide range of substrates without knowing the specificity of any of the enzymes. Using a cocktail of hydrolytic enzymes also protects a sample from a wide range of future unknown contaminants from a vast number of sources. For example, the protein of the invention or part thereof is added to samples where contaminating substrates is undesirable. Alternatively, the protein of the invention or part thereof may be bound to a chromatographic support, either alone or in combination with other hydrolytic enzymes, using techniques well known in the art, to form an affinity chromatography column. A sample containing the undesirable substrate is run through the column to remove the substrate. Immobilizing the protein of the invention or part thereof on a support is particularly advantageous for those embodiments in which the method is to be practiced on a commercial scale. This immobilization facilitates the removal of the enzyme from the batch of product and subsequent reuse of the enzyme. Immobilization of the protein of the invention or part thereof can be accomplished, for example, by replacing the transmembrane region by a cellulose-binding domain in the protein. One of skill in the art will understand that other methods of immobilization could also be used and are described in the available literature. Alternatively, the same methods may be used to identify new substrates.

[0257] In another embodiment, the protein of the invention or part thereof may be used to identify or quantify the amount of a given substrate in a biological sample. In a preferred embodiment, the protein of the invention or part thereof is used in assays and diagnostic kits for the identification and quantification of substrates in a biological sample.

[0258] In still another embodiment, the protein of the invention or part thereof may be used to diagnose, treat and/or prevent disorders where the presence of substrates is undesirable or deleterious. Such disorders include but are not limited to, cancer, neurodegenerative disorders such as Parkinson's and Alzheimer's diseases, diabetes. In a preferred embodiment, the protein of the invention or part thereof may be administered to a subject to reduce immune response. Although the inventors do not wish to be limited to a particular mechanism of action, it is thought that reduction would at least protect against lysophospholipid toxicity, deacylate platelet activating factor, and hydrolyze lytic lysophospholipids such as lysophosphatidylcholine which contribute to immune response, and in particular hypersensitivity reactions and immune cell mediated injuries. Such injuries include, but are not limited to, adult respiratory distress syndrome, allergies, asthma, arteriosclerosis, bronchitis, emphysema, hypereosinophilia, myocardial or pericardial inflammation, rheumatoid arthritis, complications of heart attack, stroke, cancer, hemodialysis, infections, and trauma.

[0259] In addition, the protein of the invention or part thereof may be used to identify inhibitors for mechanistic and clinical applications. Such inhibitors may then be used to identify or quantify the protein of the invention in a sample, and to diagnose, treat or prevent any of the disorders where the protein's activity is undesirable and/or deleterious including but not limited to inflammation, disorders associated with cell proliferation, immune and inflammatory disorders. Disorders associated with cell proliferation include adenocarcinoma, sarcoma, lymphoma, leukemia, melanoma, myeloma, teratocarcinoma, and in particular, cancers of the adrenal gland, bladder, bone, brain, breast, gastrointestinal tract, heart, kidney, liver, lung, ovary, pancreas, paraganglia, parathyroid, prostate, salivary glands, skin, spleen, testis, thyroid, and uterus. Immune and inflammatory disorders include Addison's disease, AIDS, adult respiratory distress syndrome, allergies, anemia, asthma, atherosclerosis, bronchitis, cholecystitus, Crohn's disease, ulcerative colitis, atopic dermatitis, dernatomyositis, diabetes mellitus, emphysema, atrophic gastritis, glomerulonephritis, gout, Graves' disease, hypereosinophilia, irritable bowel syndrome, lupus erythematosus, multiple sclerosis, myasthenia gravis, myocardial or pericardial inflammation, osteoarthritis, osteoporosis, pancreatitis, polycystic kidney disease, polymyositis, rheumatoid arthritis, scleroderma, Sjogren's syndrome, autoimmune thyroiditis.

[0260] Moreover, antibodies to the protein of the invention or part thereof may be used for detection of the Golgi apparatus using any techniques known to those skilled in the art.

[0261] Protein of SEQ ID NO: 408 (Internal Designation 105-095-1-0-D10-FLC)

[0262] The protein of SEQ ID NO:408 encoded by the cDNA of SEQ ID NO:3 is homologous to the human parotid secretory protein HPSP (Genseq accession number W60682). PSPs are leucine-rich glycoproteins well conserved among the murine, rat, bovine and human species which belongs to the PSP multigenic family with gland specific members which common traits are early and abundant expression. Because it is extremely abundant in saliva, PSP has been proposed as a marker for tissue-specific protein production of salivary glands and appears coordinately regulated with salivary amylase. PSP is also expressed although to a lesser extent in murine lacrimal glands. Although its function remains unknown, it was shown to bind to bacteria in exocrine secretions and was proposed to have antibacterial activity (Robinson et al., Am J Physiol 272:G863-G871 (1997)). Antagonists of this protein may be used to treat cancer and autoimmune diseases particularly of secretory or gastrointestinal tissue.

[0263] It is believed that the protein of SEQ ID NO:408 or part thereof plays a role in the defense against pathogens, preferably pathogens present in the oral and gastrointestinal tracts. Preferred polypeptides of the invention are fragments of SEQ ID NO:408 having any of the biological activity described herein. The activity of the protein of the invention or part thereof on pathogens may be assessed using techniques well known to those skilled in the art including those described in Robinson et al, supra.

[0264] In one embodiment, the present invention relates to methods and compositions using the protein of the invention or part thereof to detect bacteria in biological fluids, foods, water, air, solutions and the like. For example, the protein of the invention or part thereof is added to a sample containing bacteria and allowed to bind to such bacteria using any method known to those skilled in the art including those described in Robinson et al, supra. Then, the protein may be detected using any method known to those skilled including using an antibody able to bind to the protein of the invention or part thereof, or using another polypeptide fused to the protein of the invention or part thereof that may be detected directly, such as the green fluorescent protein, or though binding to a specific antibody. In a preferred embodiment, the protein of the invention or part thereof is used in assays and diagnostic kits for the detection of exogenous pathogens in bodily fluids, tissue samples or cell cultures. In another preferred embodiment, the protein of the invention or part thereof may be used to decontaminate samples. For example, the protein of the invention or part thereof may be bound to a chromatographic support using techniques well known in the art, to form an affinity chromatography column. A sample containing the undesirable contaminant is ran through the column in order to be removed. Immobilizing the protein of the invention or part thereof on a support advantageous is particularly for those embodiments in which the method is to be practiced on a commercial scale. This immobilization facilitates the removal of the protein of the invention from the batch of product and its subsequent reuse. Immobilization of the protein of the invention or part thereof can be accomplished, for example, by inserting a cellulose-binding domain in the protein. One of skill in the art will understand that other methods of immobilization could also be used and are described in the available literature.

[0265] In another embodiment, the invention related to methods and compositions using the protein of the invention or part thereof to retard and/or inhibit the growth of pathogens, preferably bacteria, more preferably Listeria and Streptococci, and Actinobacilli, either in vitro or in vivo using any methods and techniques known to those skilled in the art, alone or in combination with other antimicrobial substances. For example, the protein of the invention or part thereof may be used to disinfect aqueous samples or materials, or as a food preservative. In a preferred embodiment, compositions comprising the protein of the present invention or part thereof are added to samples or materials as a “cocktail” with other antimicrobial substances to decontaminate samples. The advantage of using such a cocktail is that one is able to decontaminate samples without knowing the specificity of any of the antimicrobial substances. Using such a cocktail also protects a sample or material from a wide range of future unknown contaminants from a vast number of sources.

[0266] In another embodiment, the invention relates to methods and compositions using the protein of the invention or part thereof as a marker protein to selectively identify tissues, preferably salivary glands and lacrimal glands. For example, the protein of the invention or part may be used to synthesize specific antibodies using any techniques known to those skilled in the art including those described therein. Such tissue-specific antibodies may then be used to identify tissues of unknown origin, for example, forensic samples, differentiated tumor tissue that has metastasized to foreign bodily sites, or to differentiate different tissue types in a tissue cross-section using immunochemistry.

[0267] Protein of SEQ ID NO: 452 (Internal Designation 108-019-5-0-F5-FLC)

[0268] The protein of SEQ ID NO:452 encoded by the cDNA of SEQ ID NO:47 is homologous to human proteins either thought to be a transmembrane proteolipid protein down regulated upon cell differentiation induced by sodium butyrate (Genbank accession number AF057306) or described as the alternatively spliced chemokine-like factor 2 (Genbank accession number AF135380).

[0269] Proteolipids are a class of hydrophobic membrane proteins characterized in part by their capacity to assume conformations compatible with solubility in organic solvents and in water (Sapirstein V. S. et al (1983) Biochemistry 22:3330-3335). This amphipathic character of proteolipids explains their participation in transmembrane ion movement. Proteolipids are components of ion channel and transport systems, such as H⁺ channels (Arai H. et al (1987) J Biol Chem 262:11006-11011), Ca²⁺ channels (Eytan G. D. et al (1977) J Biol Chem 252: 3208-3213) and the C (membrane channel) subunit of the vacuolar H⁺-ATPase (Nelson H. et al (1990) J Biol Chem 265: 20390-20393).

[0270] The latter proteolipid, also known as ductin, is also associated with gap junctions. Gap junctions are the relatively large pores which allow free diffusion of ions across biological membranes (Finbow M. E. et al (1995) Bioessays 17:247-255). Altered gap-junction intercellular communication (GJIC) may play an essential role in cancer development. A lack of GJIC has been observed between transformed and neighboring normal cells (Trosko et al (1990) Radiation Res 123:241-251). A decrease in GJIC has also been observed within tumor cells (Krutovskikh et al (1991) Carcinogenesis 12:1701-1706).

[0271] Proteolipids are also involved in membrane vesicular trafficking. Due to their lipid-like properties, proteolipids destabilize lipid bilayers and promote membrane vesicle fusion. Such proteolipid-assisted events may include the fusions and fissions of the nuclear membrane, endoplasmic reticulum, Golgi apparatus, and various inclusion bodies (peroxisomes, lysosomes, etc).

[0272] Human T-lymphocyte maturation-associated protein (MAL), a 153 amino acid proteolipid, has been localized to the endoplasmic reticulum (ER) of T-lymphocytes, where it mediates the fusion of ER-derived vesicles and Golgi cisterna (Rancano C. et al (1994) J Biol Chem 269:8159-8164). A canine MAL homologue, VIP17, is involved in the sorting and targeting of proteins between the Golgi complex and the apical plasma membrane (Zacchetti D. et al (1995) FEBS Left 377:465-469). A rat MAL homologue, rMAL, is expressed in the myelinating cells of the nervous system including oligodendrocytes and Schwann cells. The rMAL protein serves as a gap junction component and plays a role in myelin compaction (Schaeren-Wiemers N. et al (1995) J. Neurosci 5753-5764).

[0273] Plasmolipin from rat is a proteolipid localized to plasma membranes in kidney and brain. It has 157 amino acids and, based on hydropathy plots and secondary structure predictions, consists of four alpha-helical transmembrane domains (I through IV) of 20-22 amino acids in length. Transmembrane domains III and IV contain hydroxyl groups which may contribute to an aqueous channel. Domains I through III are connected by short hydrophilic segments of 9-11 amino acids in length, and domains III and IV are connected by a longer hydrophilic segment of 20 amino acids. The small size and high hydrophobicity of plasmolipin constrains the distribution of its transmembrane regions such that the four transmembrane alpha-helices form an antiparallel bundle, and both the amino- and carboxy-termini face the cytoplasm. This structural model defines the growing class of small hydrophobic transport-related proteolipids containing four-helix transmembrane segments, such as the MAL homologues (Rancano et al, supra), and the vacuolar H⁺-ATPase C subunit (Nelson et al, supra).

[0274] In rat brain, plasmolipin is localized to myelinated nerve tracts, and its expression increases markedly with the onset of myelination (Fischer I. et al (1991) Neurochem Res 28:81-89). The distribution of plasmolipin within myelin appears to include regions active in membrane recycling. Endocytotic coated vesicles isolated from myelinated tracts are enriched with plasmolipin (Sapirstein V. S. (1994) J Neurosci Res 37:348-358). Incorporation of the purified rat plasmolipin protein into lipid bilayers induces voltage-dependent K⁺ channel formation, suggesting it may function in vivo as a pore or channel (Tosteson M. T. et al (1981) J Membr Biol 63:77-84). Channel formation involved the trimerization of the plasmolipin molecule. The oligomerization model of the plasmolipin molecule portrays transmembrane domains III and IV as walls of the channel, consistent with the presence of hydroxyl groups in these domains (Sapirstein et al (1983) supra). The putative role of rat plasmolipin in transport suggests its function may be in the fluid volume regulation of the myelin complex (Fischer et al (1994), supra).

[0275] Proteolipids are involved in membrane trafficking, gap junction formation, ion transport and cellular fluid volume regulation. The selective modulation of their expression may provide a means for the regulation of vesicle trafficking or the formation of channels or gap junctions in normal as well as acute and chronic disease situations.

[0276] It is believed that the protein of SEQ ID NO: 452 or part thereof plays a role membrane trafficking, gap junction formation, ion transport and/or cellular fluid volume regulation. Preferred polypeptides of the invention are fragments of SEQ ID NO:452 having any of the biological activity described herein. The ability of the protein of the invention or part thereof to form pore and/or to destabilize lipid bilayers may be assessed using techniques well known to those skilled in the art including those described in U.S. Pat. No. 5,843,714.

[0277] The invention relates to methods and compositions using the protein of the invention or part thereof to promote membrane vesicle fusion both in vitro and in vivo.

[0278] In an embodiment, the protein of the invention or part thereof is used to facilitate exocytosis. For example, the protein of the invention or part thereof may be used to increase the release of chemokines involved in cell migration, proteases which are active in inflammation or other similar activities involving endothelial cells, fibroblasts, lymphocytes, etc. Accordingly, the protein of the invention or part thereof may be used to diagnose, treat and/or prevent disorders associated with abnormal membrane trafficking including but not limited to viral or other infections, traumatic tissue damage, hereditary diseases such as arthritis or asthma, invasive leukemias and lymphomas.

[0279] In another embodiment, the protein of the invention or part thereof may be used to promote vesicle fusion for drug delivery. The protein of the invention or part thereof may be incorporated into liposomes or artificial vesicles with a drug of interest and then used to promote vesicle fusion for drug delivery. [0252] In another embodiment, antibodies to the protein of the invention or part thereof may be used for detection of membranes and/or gap junctions using any techniques known to those skilled in the art. In a preferred embodiment, the protein of the invention or part thereof may be used to diagnose disorders associated with altered intercellular communication, more preferably altered gap junction communication, including but not limited to cardiac arrhythmia.

[0280] Protein of SEQ ID NO:406 (Internal Designation 105-016-3-0-E3-FLC)

[0281] The 325-amino-acid-long protein of SEQ ID NO:406 encoded by the cDNA of SEQ ID NO:1 shows homology over the whole length of the 332-amino-acid-long murine neural proliferation differentiation and control 1 protein or NPDC-1 (Genbank accession number 35×67209) which is thought to play an important role in the control of neural cell proliferation and differentiation as well as in cell survival by interacting with cell cycle regulators such as E2F-1 (Galiana et al., Proc. Natl. Acad. Sci. USA 92:1560-1564 (1995); Dupont et al., J. Neurosci. Res. 51:257-267 (1998)).

[0282] It is believed that the protein of SEQ ID NO:406 or part thereof plays a role in cell proliferation and differentiation. Preferred polypeptides of the invention are polypeptides comprising the amino acids of SEQ ID NO:406 from positions 1 to 81, and 129 to 308. Other preferred polypeptides of the invention are fragments of SEQ ID NO:406 having any of the biological activity described herein. The activity of the protein of the invention or part thereof on cellular proliferation and differentiation may be assessed using techniques well known to those skilled in the art including those described in Galiana et al, supra.

[0283] In one embodiment, the invention related to methods and compositions using the protein of the invention or part thereof to inhibit cellular proliferation, preferably neuronal cell proliferation, using any methods and techniques known to those skilled in the art including those described in Galiana et al, supra.

[0284] In another embodiment, the protein of the invention or part thereof, may be used to diagnose, treat and/or prevent several disorders linked to cell proliferation and differentiation including, but not limited to cancer and neurodegenerative disorders such as Parkinson's or Alzheimer's diseases. For diagnostic purposes, the expression of the protein of the invention could be investigated using any of the Northern blotting, RT-PCR or immunoblotting methods described herein and compared to the expression in control individuals.

[0285] Protein of SEQ ID NO:407 (Internal Designation 105-031-3-O-D6-FLC)

[0286] The protein of SEQ ID NO:407 encoded by the cDNA of SEQ ID. NO:2 exhibits homology to a murine putative sialyltransferase protein (TREMBL accession number 088725). Although sialyltransferases have virtually no sequence homology, they display the features of type II transmembrane proteins with a short N-terminal cytoplasmic tail, a 16-20 amino acid signal-anchor domain, and an extended stem region which is followed by the large C-terminal catalytic domain (Weinstein, J. et al., J. Biol. Chem. 262, 17735-17743, 1987; Paulson, J. C. et al., J. Biol. Chem. 264,17615-17618, 1989).

[0287] The protein of SEQ ID NO:407 displays the two conserved motifs of the sialyltransferase protein family, namely the centrally located sialylmotifL (positions 73 to 120) thought to be involved in the recognition of the sugar nucleotide donor common to all sialyltransferases and the sialylmotifS (positions 211 to 233) thought to be the catalytic site and located in the C-terminus of the protein. Furthermore, the 302-amino-acid long protein of SEQ ID NO:407 has a size similar to the one of the members of the sialyltransferase family. In addition, the protein of the invention has a predicted transmembrane structure. Indeed, it contains 2 potential transmembrane segments (positions 7 to 27 and 206 to 226, underlined in FIG. 12) as predicted by the software TopPred II (Claros and von Heijne, CABIOS applic. Notes, 10:685-686 (1994)).

[0288] Sialyltransferases are glycosyl transferases found primarily in the Golgi apparatus and also in body fluids such as breast milk, colustrum and blood. They are responsible for the terminal sialylation of carbohydrate groups of glycoproteins, glycolipids and oligosaccharides widely distributed in animal tissues. Sialic acids play important roles in the biological functions of carbohydrate structures because of their terminal position. Sialyltransferases are indeed involved in a large variety of biological processes such as cell-cell communication, cell-matrix interactions, maintenance of serum glycoproteins in the circulation, and so on (Sjoberg et al., J. Biol. Chem. 271:7450-7459 (1996); Tsuji, J. Biochem. 120:1-13 (1996)). A variety of biological phenomena are associated with recognition of sialosides, including viral replication, escape of immune detection, and cell adhesion (Schauer, R. Trends Biochem. Sci. 1985, 10, 357-360; Biology of the Sialic Acids ed. A. Rosenberg, Plenum Press, New York, 1995). For example, suppressed antibody production was observed in alpha-2,6-sialyltransferase knockout mice (Muramatsu, J. Biochem. 127:171-6 (2000). In addition, carbohydrate structures have been shown to influence proteins' stability, rate of in vivo clearance from blood stream, rate of proteolysis, thermal stability and solubility. Changes in the oligosaccharide portion of cell surface carbohydrates have been noted in cells which have become cancerous.

[0289] It is believed that the protein of SEQ ID NO:407 or part thereof plays a role in the biosynthesis of sialyl-glycoconjugates, probably as a sialyltransferase. Thus, the protein of the invention or part thereof is thought to be involved in cell-cell communication, cell-matrix interactions, maintenance of serum glycoproteins in the circulation, viral replication, escape of immune detection, and cell adhesion. Preferred polypeptides of the invention are polypeptides comprising the amino acids of SEQ ID NO:407 from positions 73 to 120, and from position 211 to 233. Other preferred polypeptides of the invention are fragments of SEQ ID NO:407 having any of the biological activity described herein. The sialyltransferase activity of the protein of the invention or part thereof may be assayed using any other technique known to those skilled in the art including those described in Sadler et al., J. Biol. Chem., 254:4434-4443 (1979) or U.S. Pat. Nos. 5,827,714 and 6,017,743.

[0290] One object of the present invention are compositions and methods of targeting heterologous polypeptides to the Golgi apparatus by recombinantly or chemically fusing a fragment of the protein of the invention to an heterologous polypeptide. Preferred fragments are signal peptide, transmembrane domains, the proline-rich region comprised between positions 31 and 67, tyrosine containing regions and/or any other fragments of the protein of the invention, or part thereof, that may contain targeting signals for the Golgi apparatus including but not limited to proline-rich regions (Ugur and Jones, Mol Cell Biol 11:1432-32 (2000), Picetti and Borrelli, Exp Cell Res 255:258-69 (2000)), tyrosine-based Golgi targeting signal region (Zhan et al., Cancer Immunol Immunother 46:55-60 (1998); Watson and Pessin J. Biol. Chem. 275:1261-8 (2000); Ward and Moss, J. Virol. 74:3771-80 (2000) or any other region as defined in Munro, Trends Cell Biol. 8:11-15 (1998); Luetterforst et al., J. Cell. Biol. 145:1443-59 (1999); Essl et al., FEBS Lett. 453:169-73 (1999).

[0291] Sialylated compounds have considerable potential both as therapeutics and as reagents for clinical assays. However, synthesis of glycosylated compounds of potential commercial and/or therapeutic interest is difficult because of the very nature of the saccharide subunits. A multitude of positional isomers in which different substituent groups on the sugars become involved in bond formation, along with the potential formation of different anomeric forms, are possible. As a result of these problems, large scale chemical synthesis of most carbohydrates is not possible due to economic considerations arising from the poor yields of desired products. Enzymatic synthesis using glycosyl transferases such as sialyltransferases provides an alternative to chemical synthesis of carbohydrates. Enzymatic synthesis using glycosidases, glycosyl transferases, or combinations thereof, have been considered as a possible approach to the synthesis of carbohydrates. As a matter of fact, enzyme-mediated catalytic synthesis would offer dramatic advantages over the classical synthetic organic pathways, producing very high yields of carbohydrates economically, under mild conditions in aqueous solutions, and without generating notable amounts of undesired side products. To date, such enzymes are however difficult to isolate, especially from eukaryotic, e.g., mammalian sources, because these proteins are only found in low concentrations, and tend to be membrane-bound. In addition to being difficult to isolate, the acceptor (peptide) specificity of glycosyl transferases is poorly understood. Thus, there is a need for obtaining recombinant glycosyl transferase, including sialyltransferases, that could be produced in very large amounts.

[0292] Thus, the invention related to methods and compositions using the protein of the invention or part thereof to synthesize glycosylated compounds, either glycoproteins, glycoplipids, or oligosaccharides, more particularly sialylated compounds. If necessary, the protein of the invention or part thereof may be produced in a soluble form by removing its transmembrane domains and/or its Golgi retention signal using any of the methods skilled in the art including those described in U.S. Pat. No. 5,776,772. For example, the protein of the invention or part thereof is added to a sample containing sialic acid and a substrate compound in conditions allowing glycosylation, more particularly sialylation and allowed to catalyze the glycosylation of this compound. In a preferred embodiment, the enzymatic reaction carried out by the protein of the invention is part of a series of other chemical and/or enzymatic reactions aiming at the synthesis of complex glycosylated compounds, such as the ones described in U.S. Pat. Nos. 5,409,817 and 5,374,541. In another preferred embodiment where the method is to be practiced on a commercial scale, it may be advantageous to immobilize the glycosyl transferase on a support. This immobilization facilitates the removal of the enzyme from the batch of product and subsequent reuse of the enzyme. Immobilization of glycosyl transferases can be accomplished, for example, by removing from the transferase its membrane-binding domain, and attaching in its place a cellulose-binding domain. One of skill in the art will understand that other methods of immobilization could also be used and are described in the available literature.

[0293] In another embodiment, the present invention relates to processes and compositions for producing glycosylated compounds, preferably sialylated compounds, wherein a cell is genetically engineered to produce the protein of the invention or part thereof and used in combination with one or several other cells able to produce the donor substrate for the protein of the invention. Preferably, a bacteria is engineered to express the protein of the invention and used with recombinant bacteria expressing enzymes able to synthesize cytidine 5′-monophospho-N-acetyl neuramininc acid (CMP-NeuAc). The methods for performing the above bacterial coupling process and making the above compositions are carried using the methods known in the art and described in Endo et al., Appl. Microbiol. Biotechnol. 53:257-61, (2000).

[0294] Another embodiment of the present invention relates to a process and compositions for controlling the glycosylation of proteins in a cell wherein an insect, plant, or animal cell is genetically engineered to produce one or more enzymes which provide internal control of the cell's glycosylation mechanism. Preferably, the invention relates to a Chinese hamster ovary (CHO) cell line that is genetically engineered to produce a sialyltransferase of the present invention either alone or in combination with other sialyltransferases. This supplemental sialyltransferase modifies the CHO glycosylation machinery to produce glycoproteins having carbohydrate structures which more closely resemble naturally occurring human glycoproteins. The methods for performing the above process and making the above compositions are carried using the methods known in the art and described in U.S. Pat. No. 5,047,335.

[0295] The invention further relates to glycosylated compounds, preferably sialylated compounds, obtained using any of the processes described herein using the protein of the invention or part thereof. Such compounds may be used in the diagnosing, prevention and/or treating of disorders in which the recognition of such compounds is impaired or needs to be impaired. These disorders include, but are not limited to, cancer, cystic fibrosis, ulcer, inflammation and immune based disorders, including autoimmune disorders such as arthritis, fertility disorders, and hypothyroidism. These conditions include infectious diseases where active infection exists at any body site, such as meningitis and salpingitis; complications of infections including septic shock, disseminated intravascular coagulation, and/or adult respiratory distress syndrome; acute or chronic inflammation due to antigen, antibody and/or complement deposition; inflammatory conditions including arthritis, chalangitis, colitis, encephalitis, endocarditis, glomerulonephritis, hepatitis, myocarditis, pancreatitis, pericarditis, reperfusion injury and vasculitis. Immune-based diseases include but are not limited to conditions involving T-cells and/or macrophages such as acute and delayed hypersensitivity, graft rejection, and graft-versus-host disease; auto-immune diseases including Type I diabetes mellitus and multiple sclerosis. In a preferred embodiment, these glycosylated compounds or derivatives thereof may be used as pharmacological agents to trap pathogens or endogenous ligands thus reducing the binding of pathogens or endogenous ligands to the endogenous glycosylated compounds. For example, such compounds may be used to prevent and/or inhibit the adhesion of cancer cells to inner wall of blood vessel or aggregation between cancer cells and platelets, thus reducing cancer metastasis, to prevent and/or inhibit the adhesion of neutrophils to blood vessels endothelial cells, thus reducing inflammation. Other disorders include infections in which recognition of a glycosylated product is essential to the development of the infection. Such infections include, but are not limited to, those caused by Vibrio cholerae, Escherichia Coli, Salmonella, and the influenza virus. In a preferred embodiment, such compounds, preferably sialyl lactose, are used as neutralizers for enterotoxins from bacteria such as Vibrio cholerae, Escherichia Coli, and Salmonella as described in U.S. Pat. No. 5,330,975. In another preferred embodiment, such compounds, preferably galactose oligosaccharides, are used to diagnose, identify and inhibit the adherence of uropathogenic bacteria to red blood cells (U.S. Pat. No. 4,657,849). In another preferred embodiment, such compound, preferably oligosaccharides, are used as gram positive antibiotics and disinfectants (U.S. Pat. Nos. 4,851,338 and 4,665,060). In another embodiment, such compounds, preferably sialyl lactose, may be used for the treatment of arthritis and related autoimmune diseases (see, U.S. Pat. No. 5,164,374). In another embodiment, such compounds, preferably sialylalpha (2,3) galactosides, sialyl lactose and sialyl lactosamine, may be used for the treatment of ulcers. Phase I clinical trials have began for the use of the former compound in this capacity. (Balkonen, et al., FEMS Immunology and Medical Microbiology 7:29 (1993) and BioWorld Today, p. 5, Apr. 4, 1995). In addition, such compounds, preferably sialyl lactose, may be used as food supplement, for instance in baby formula.

[0296] In addition, the protein of the invention or part thereof may be used in the development of inhibitors of glycosyl transferase, more particularly inhibitors of sialyltransferases and sialidases, for mechanistic and clinical applications (Taylor, G. Curr. Opin. Struc. Biol. 1996, 6, 830-837; Colman, P. M., Pure Appl. Chem. 1995, 67, 1683-1688; Bamford, M. J. J Enz. Inhib. 1995, 10, 1-16; Khan, S. H. & Matta, K. L. In Glycoconjugates, Composition, Structure, and Function. pp361-378. ed., Allen, H. J. & Kisailus, E. C. Marcel Dekker, Inc. New York, 1992, Thome-Tjomsland et al., Transplantation 69:806-8, (2000); Basset et al, Scand. J. Immunol. 51:307-11 (2000)).

[0297] The invention further relates to methods and compositions using the protein of the invention or part thereof to diagnose, prevent and/or treat several disorders in which recognition of glycosylated compounds, preferably of sialylated compounds, is impaired or needs to be impaired. For diagnostic purposes, the expression of the protein of the invention could be investigated using any of the Northern blotting, RT-PCR or immunoblotting methods described herein and compared to the expression in control individuals. For prevention and/or treatment purposes, inhibiting the endogenous expression of the protein of the invention using any of the antisense or triple helix methods described herein may be used to reduce the production of glycosylated compounds detrimental to the organism in any of the disorders described above.

[0298] Protein of SEQ ID NOs:436 (Internal Designation 108-008-5-0-C5-FL)

[0299] The protein of SEQ ID NO:436 encoded by the cDNA of SEQ ID NO:31 exhibits homology over the whole length to the murine recombination activating gene 1 inducing protein found in stromal cell (Genbank accession number X96618). The amino acid residues are identical except for the positions 6, 7, 10-13, 17, 25, 34-35, 42, 51, 56, 62, 68, 71, 74, 78, 91, 93, 95-96, 106, 121-122, 151-152, 159, 162-163, 170-171, 176-177, 188, 190, 192, 196, 199, 202-203, 206, 210, 215 and 217 of the 221 amino acid long matched protein. This protein with 4 potential transmembrane segments facilitates gene activation of RAG-1 which is involved in the recombination of V(D)J segments in T cells (Tagoh et al., Biochem Biophysic Res Comm 221:744-749 (1996); Muraguchi et al, Leuk Lymphoma, 30:73-85 (1998)).

[0300] It is believed that the protein of SEQ ID NO:436 may play a role in lymphocyte repertoire formation. Preferred polypeptides of the invention are fragments of SEQ ID NO:406 having any of the biological activity described herein. The activity of the protein of the invention or part thereof on the induction of RAG expression may be assessed using techniques well known to those skilled in the art including those described in Tagoh et al, supra.

[0301] In an embodiment, antibodies to the protein of the invention or part thereof may be used as markers for haematopoietic precursors, preferably precursors for B and T cells.

[0302] In another embodiment, the protein of the invention or part thereof, may be used to diagnose, treat and/or prevent immunological disorders including, but not limited to Ommen'syndrome, acute and delayed hypersensitivity, graft rejection, and graft-versus-host disease; auto-immune diseases including Type I diabetes mellitus and multiple sclerosis, lymphoid neoplasia including non Hodgkins' lymphoma, ALL and CLL. For diagnostic purposes, the expression of the protein of the invention could be investigated using any of the Northern blotting, RT-PCR or immunoblotting methods described herein and compared to the expression in control individuals. In another embodiment, the protein of the invention or part thereof may also be used to modulate the immune response to pathogens.

[0303] Protein of SEQ ID NO:419 (Internal Designation 116-073-4-0-C8-FLC)

[0304] The protein of SEQ ID NO:419 encoded by the cDNA of SEQ ID NO:14 shows homology over the whole length of the widely conserved family of lysozyme C precursors (fish, bird, and mammals). In particular, the protein of the invention displays 17 out of the 20 amino acids conserved among all known lysozyme C proteins at positions 115, 117, 123, 137, 141, 144, 146, 150, 151, 162, 166, 180, 181, 194, 197, 201 and 213 (Prager and Jollès, Lysozymes: model enzymes in biochemistry and biology, ed. Jollès, 9-321 (1996)). In addition, this protein displays the characteristic signature of the family 22 of glysosyl hydrolases (PROSITE signature from positions 162 to 185, eMotif signatures from positions 183 to 202 and from positions 111 to 120), which contain the evolutionary related alpha-lactalbumin, the regulatory subunit of lactose synthetase, and the bacteriolytic defensive enzymes lysozyme C (Qasba and Kumar, Crit. Rev. Biochem. Mol. Biol. 32:255-306 (1997)). Furthermore, the cDNA of SEQ ID NO:14 seems to be preferentially expressed in testis (Table VII) and in germ cells tumors (Table VIII).

[0305] Lysozyme, an ubiquitous protein secreted in most body secretions, is defined as 1,4-beta-N-acetylmuramidases which cleave the glycoside bond between the C-1 of N-acetyl-muramic acid and the C-4 of N-acetylglucosamine in the peptidoglycan of bacteria. It has various therapeutic properties, such as antiviral, antibacterial, anti-inflammatory and antihistaminic effects. The activity of the lysozyme as an anti-bacterial agent appears to be based on both its direct bacteriolytic activity and also on stimulatory effects in connection with phagocytosis of polymorphonuclear leucocytes and macrophages (Biggar and Sturgess, J. M. Infect Immunol. 16: 974-982 (1977); Thacore and Willet, Am. Rev. Resp. Dis. 93: 786-790 (1966); Klockars and Roberts, P. Acta Haematol 55: 289-292 (1976)). Lysozyme has proven to be not only a selective factor but also an effective factor against microorganisms of the mouth (Iacono et al, J. J. Infect. Immunol. 29: 623-632 (1980)). Lysozyme can also kill pathogens by acting synergistically with other proteins such as complement or antibody to lyse pathogenic cells. Lysozyme, also inhibits chemotaxis of polymorphonuclear leukocytes and limits the production of oxygen free radicals following an infection. This limits the degree of inflammation, while at the same time enhances phagocytosis by these cells. Other postulated functions of lysozyme include immune stimulation (Jolles, P. Biomedicine 25: 275-276 (1976) Ossermann, E. F. Adv. Pathobiol 4: 98-102 (1976)) and immunological and non-immunological monitoring of host membranes for any neoplastic transformation (Jolles, P. Biomedicine 25: 275-276 (1976); Ossermann, E. F. Adv. Pathobiol 4: 98-102 (1976)). Lysozyme may thus be used in a wide spectrum of applications (see U.S. Pat. No. 5,618,712). Determination of the lysozymes from serum and/or urine is used to diagnose various diseases or as an indicator for their development. In acute lymphoblastic leukaemia the lysozyme serum level is significantly reduced, whereas in chronic myelotic leukaemia and in acute monoblastic and myelomonocytic leukaemia the lysozyme concentration in the serum is greatly increased. The therapeutically effective use of lysozyme is possible in the treatment of various bacterial and virus infections (Zona, Herpes zoster), in colitis, various types of pain, in allergies, inflammation and in pediatrics (the conversion of cows milk into a form suitable for infants by the addition of lysozyme).

[0306] It is believed that the protein of SEQ ID NO:419 or part thereof plays a role in glycoprotein and/or peptidoglycan metabolism, probably as a glycosyl hydrolase of family 22. Thus, the protein of the invention or part thereof may be involved in immune and inflammatory responses and may have antiviral, antibacterial, anti-inflammatory and/or anti-histaminic functions. Preferred polypeptides of the invention are polypeptides comprising the amino acids of SEQ ID NO:419 from positions 70 to 215, 111 to 120, 183 to 202, and 162 to 185. Other preferred polypeptides of the invention are fragments of SEQ ID NO:419 having any of the biological activities described herein. The glycolytic activity of the protein of the invention or part thereof may be assayed using any of the assays known to those skilled in the art including those described in Gold and Schweiger, M. Methods in Enzymology, Vol. XX, Part C pp. 537-542, Ed. Moldave, Academic Press,New York and London, 1971 and in the U.S. Pat. No. 4,255,517.

[0307] The invention relates to methods and compositions using the protein of the invention or part thereof to hydrolyze one or several substrates, alone or in combination with other substances, preferably antiviral, antifungal and/or antibacterial substances including but not limited to immunoglobulins, lactoferrin, betalysin, fibronectin, and complement components. Such substrates are glycosylated compounds, preferably containing beta-1-4-glycoside bonds, more preferably containing beta-1-4-glycoside bonds between n-acetylomuraminic acid and n-acetyloglucosamine. For example, the protein of the invention or part thereof is added to a sample containing the substrate(s) in conditions allowing hydrolysis, and allowed to catalyze the hydrolysis of the substrate(s). In a preferred embodiment, the hydrolysis is carried out using a standard assay such as those described by Gold and Schweiger, supra, and U.S. Pat. Nos. 5,871,477 and 4,255,517. In a preferred embodiment, the protein of the invention or part thereof may be used to lyze recombinant bacteria in order to recover the recombinant DNA, the recombinant protein of interest, or both using, for example, any of the assays described in Sambrook, et al., Molecular Cloning: A Laboratory Manual, Second Edition, Cold Spring Harbor Laboratory Press (1989).

[0308] In an embodiment, the protein of the invention or part thereof is used to hydrolyze contaminating substrates in an aqueous sample or onto a material, preferably glassware and plasticware. In particular, the protein of the invention or part thereof may be used as a disinfectant in dental rinse, in protection of aqueous systems or in preparing material for medical applications using any of the methods and compositions described in U.S. Pat. Nos. 5,069,717, 4,355,022 and 5,001,062. In a preferred embodiment, the protein of the invention is used as a host resistance factor in infants' formulas to convert cow's milk into a form more suitable for infants as described in U.S. Pat. No. 6,020,015. In another preferred embodiment, the protein of the invention or part thereof may be used as a food preservative (see Hayashi et al., Agric. Biol. Chem. (European Edition of Japanese Journal of Agriculture, Biochemistry and Chemistry), Vol. 53, pp. 3173-3177, 1989). In addition, the protein of the invention or part thereof may be used to clarify xanthan gum fermented broth for applications in food and in cosmetic industries using the method described in U.S. Pat. No. 5,994,107. In another preferred embodiment, compositions comprising the protein of the present invention or part thereof are added to samples or materials as a “cocktail” with other antimicrobial substances, preferably antibiotics or hydrolytic enzymes such as those described in U.S. Pat. Nos. 5,458,876 and 5,041,326 to decontaminate the samples. For example, the protein of the invention or part thereof may be used in place or in combination with antibiotics in cell cultures. The advantage of using a cocktail of hydrolytic enzymes is that one is able to hydrolyze a wide range of substrates without knowing the specificity of any of the enzymes. Using a cocktail of hydrolytic enzymes also protects a sample or material from a wide range of future unknown contaminants from a vast number of sources. For example, the protein of the invention or part thereof is added to samples where contaminating substrates is undesirable. Alternatively, the protein of the invention or part thereof may be bound to a chromatographic support, either alone or in combination with other hydrolytic enzymes, using techniques well known in the art, to form an affinity chromatography column. A sample containing the undesirable substrate is run through the column to remove the substrate. Immobilizing the protein of the invention or part thereof on a support advantageous is particularly for those embodiments in which the method is to be practiced on a commercial scale. This immobilization facilitates the removal of the enzyme from the batch of product and subsequent reuse of the enzyme. Immobilization of the protein of the invention or part thereof can be accomplished, for example, by inserting a cellulose-binding domain in the protein. One of skill in the art will understand that other methods of immobilization could also be used and are described in the available literature. Alternatively, the same methods may be used to identify new substrates.

[0309] In addition, the protein of the invention or part thereof may be useful to identify or quantify the amount of a given substrate in biological fluids, foods, water, air, solutions and the like. In a preferred embodiment, the protein of the invention or part thereof is used in assays and diagnostic kits for the identification and quantification of exogenous substrates in bodily fluids including blood, lymph, saliva or other tissue samples, in addition to bacterial, fungal, plant, yeast, viral or mammalian cell cultures. In a preferred embodiment, the protein of the invention or part thereof is used to detect, identify, and or quantify eubacteria using reagents and assays described in U.S. Pat. No. 5,935,804. Briefly, the protein of the invention of part thereof is catalytically inactived, i.e. capable of binding but not cleaving a peptidoglycan comprising NAc-muramic acid in the eubacteria, using any of the methods known to those skilled in the art including those which produce a mutant enzyme, a recombinant-enzyme, or a chemically inactivated enzyme. The catalytically inactive protein of the invention is then incubated with an aliquot of a biological sample under conditions suitable for binding of the inactive enzyme to the peptidoglycan substrate. Then, the bound enzyme is detected to assess the presence or amount of the eubacteria in the biological sample.

[0310] In another embodiment, the nucleic acid of the invention or part thereof may be used to increase disease resistance of plants to bacterial, fungal and/or viral infections. A polynucleotide containing the nucleic acid of the invention or part thereof is introduced into the plant genome in conditions allowing correct expression of the transgenic protein using any methods known to those skilled in the art including those disclosed in U.S. Pat. Nos. 5,349,122 and 5,850,025.

[0311] In another preferred embodiment, the protein of the invention or part thereof may be useful to treat and/or prevent bacterial, fungal and viral infections in humans or in animals caused by various agents including but not limited to Streptococcus, Veillonella alcalescens, Actinomyces, Herpes simplex, Candida albicans, Micrococcus lysodeikticus and HIV by hydrolyzing the glycosylated compounds contained in such micro-organisms. In still a preferred embodiment, the protein of the invention or part thereof is used to prevent and/or treat bacterial, fungal and viral infections in immunocompromised individuals who lack fully functional immune systems, such as neonates or geriatric patients or HIV-infected individuals, or who suffer from a disease affecting the respiratory tract such as cystic fibrosis or the gastrointestinal tract such as ulcerative colitis or sprue.

[0312] In still another embodiment, the protein of the invention or part thereof may be used as a growth factor for in vitro cell culture, preferably for T cells and T cell lines, as described in U.S. Pat. No. 5,468,635.

[0313] In addition, the protein of the invention or part thereof may be used to identify inhibitors for mechanistic and clinical applications. Such inhibitors may then be used to identify or quantify the protein of the invention in a sample, and to diagnose, treat or prevent any of the disorders where the protein's hydrolytic, immunostimulatory and/or inflammatory activities is/are undesirable and/or deleterious including but not limited to amyloidosis, colitis, lysosomal diseases, inflammatory and immune disorders including allergies and leukaemia. The protein of the invention may also be used to monitor host cell membranes for neoplastic transformation.

[0314] In still another embodiment, the invention relates to methods and compositions using the protein of the invention or part thereof as a marker protein to selectively identify tissues, preferably germ cells, more preferably testis. For example, the protein of the invention or part may be used to synthesize specific antibodies using any techniques known to those skilled in the art including those described therein. Such tissue-specific antibodies may then be used to identify tissues of unknown origin, for example, forensic samples, differentiated tumor tissue that has metastasized to foreign bodily sites, or to differentiate different tissue types in a tissue cross-section using immunochemistry.

[0315] Protein of SEQ ID NO:433 (Internal Designation 108-005-5-0-F9-FL)

[0316] The protein of SEQ ID NO:433 encoded by the extended cDNA SEQ ID NO:28 shows homology with the Drosophila rhythmically expressed gene 2 protein (Genbank accession number U65492) and with a 2-haloalkanoic acid dehalogenase (Embl accession number AJ248288). In addition, the protein of SEQ ID NO:433 exhibits the pfam signature for haloacid dehalogenase-like hydrolase family from positions 7 to 214.

[0317] Expression of the mRNA coding for Dreg-2 is dependent on the interplay between light-dark cycle, feeding conditions and expression of the per gene which is essential to the function of the endogenous circadian pacemaker (Van Gelder et al., Curr. Biol., 5:1424-1436 (1995)). The matched pfam hydrolase family include proteins which are structurally different from the alpha/beta hydrolase family and which include L-2-haloacid dehalogenase, epoxide hydrolases and phosphatases (see Pfam accession number PF00702).

[0318] Organohalogen compounds are by-products in several industrial processes that are considered as environmental pollutants. The detection of trihalomethanes, halogenated acetic acids, halogenated acetonitriles and halogenated ketones in city water has become a great problem because of their liver toxicity and mutagenicity. Halogenated organic acids, for example halogenated acetic acids such as chloroacetic acid, dichloroacetic acid, trichloroacetic acid and bromoacetic acid have been designated as environment surveillance items in Japan since 1993. Increasing environmental concerns have created a demand for products that are free from such environmentally unsound byproducts. Physical methods of decontaminating aqueous reaction products containing unwanted nitrogen-free organohalogen byproducts are known, such as solvent extraction with a water-immiscible solvent, or adsorption on a solid adsorbent, such as charcoal. However, such known methods can result in depletion of the reaction product, as well as requiring costly measures to recover and purify the solvent or adsorbent. Furthermore, such methods still leave the problem of how to ultimately dispose of the contaminants such as undesired halogenated oxyalkylene compounds. As one of the countermeasures, for example, biodegradation treatment such as a bioreactor is very useful because treatment can be conducted under mild conditions and is relatively low in cost. The conversion of nitrogen-free organohalogen compounds with microorganisms containing a dehalogenase is also known. For example, C. E. Castro, et al. (“Biological Cleavage of Carbon-Halogen Bonds Metabolism of 3-Bromopropanol by Pseudomonas sp.”, Biochimica et Biophysica Acta, 100, 384-392, 1965) describe the use of Pseudomonas sp. isolated from soil that metabolizes 3-bromopropanol in sequence to 3-bromopropionic acid, 3-hydroxypropionic acid and CO₂. Various U.S. Patents also describe the use of microorganisms for dehalogenating halohydrins, e.g. U.S. Pat. Nos. 4,452,894; 4,477,570; and 4,493,895.

[0319] Epoxide hydrolases are a family of enzymes which hydrolyze a variety of exogenous and endogenous epoxides to their corresponding diols. Compounds containing the epoxide functionality have become common environmental contaminants because of their wide use as pesticides, sterilants, and industrial precursors. Such compounds also occur as products, by-products, or intermediates in normal metabolism and as the result of spontaneous oxidation of membrane lipids (i.e. see, Brash, et al., Proc. Natl. Acad. Sci., 85:3382-3386 (1988), and Sevanian, A., et al., Molecular Basis of Environmental Toxicology (Bhatnager, R. S., ed.) pp. 213-228, Ann Algor Science, Michigan (1980)). As three-membered cyclic ethers, epoxides are often very reactive and have been found to be cytotoxic, mutagenic and carcinogenic (i.e. see Sugiyama, S., et al., Life Sci. 40:225-231 (1987)). Cleavage of the ether bond in the presence of electrophiles often results in adduct formation. As a result, epoxides have been implicated as the proximate toxin or mutagen for a large number of xenobiotics. Reactions of detoxification using epoxide hydrolases typically decrease the hydrophobicity of a compound, resulting in a more polar and thereby excretable substance. In addition to degradation of potential toxic epoxides, dehalogenases are believed to play a role in the formation or degradation of endogenous chemical mediators (see U.S. Pat. No. 5,445,956).

[0320] Many eukaryotic cell functions, including signal transduction, cell adhesion, gene transcription, RNA splicing, apoptosis and cell proliferation, are controlled by protein phosphorylation which is in turn regulated by the dynamic relationship between kinases and phosphatases (see U.S. Pat. No. 6,040,323 for a short review). Thus, the protein phosphatases represent unique and attractive targets for small-molecule inhibition and pharmacological intervention. In addition, hydrolytic enzymes such as alkaline phosphatase are frequently used as markers or labels in enzyme-linked assays for biological molecules and other analytes of interest such as drugs, hormones, steroids and cancer markers.

[0321] It is believed that the protein of SEQ ID NO:433 or part thereof is an hydrolase, preferably a phosphatase, an ether hydrolase or an hydrolase acting on C-halide bonds. Preferred polypeptides of the invention are polypeptides comprising the amino acids of SEQ ID NO:433 from positions 7 to 214. Other preferred polypeptides of the invention are fragments of SEQ ID NO:433 having any of the biological activity described herein. The hydrolytic activity of the protein of the invention or part thereof may be assayed using any of the assays known to those skilled in the art including those described in U.S. Pat. Nos. 5,445,942; 5,445,956, 6,017,746 and 5,871,616.

[0322] The invention relates to methods and compositions using the protein of the invention or part thereof to hydrolyze one or several substrates, alone or in combination with other substances, either in vitro or in vivo. Such substrates are compounds containing phosphoric ester bonds, ether bonds or C-halide bonds. For example, the protein of the invention or part thereof is added to a sample containing the substrate(s) in conditions allowing hydrolysis, and allowed to catalyze the hydrolysis of the substrate(s). In a preferred embodiment, the hydrolysis is carried out using any assay known to those skilled in the art including those described by the U.S. Pat. Nos. 5,445,942; 5,445,956, 6,017,746 and 5,871,616. In a preferred embodiment, the protein of the invention is used to hydrolyze environmental pollutants, preferably organohalogen compounds and epoxide, such as those cited below using any of the methods and techniques described in U.S. Pat. Nos. 6,017,746 and 5,871,616.

[0323] The invention relates to methods and compositions using the protein of the invention or part thereof to diagnose, prevent and/or treat several disorders of the circadian rhythm including, but not limited to, insomnia, depression, stress, night work or jet lag. For diagnostic purposes, the overexpression or the improper temporal expression of the protein of the invention could be investigated using any of the Northern blotting, RT-PCR or immunoblotting methods described herein and compared to the expression in control individuals.

[0324] Protein of SEQ ID NO:427 (Internal Designation 122-005-2-0-F11-FLC)

[0325] The protein of SEQ ID NO:427 encoded by the cDNA of SEQ ID NO:22 exhibits homology with a fragment of NADH-cytochrome b5 reductases of rat, bovine and human species which are part of the mitochondrial electron transport chain (Genbank accession numbers J03867, M83104 and Y09501, respectively). This homology includes the flavin-adenine dinucleotide (FAD)-binding domain of this family of proteins from positions 118 to 148, and 157 to 192. Moreover, the 3 lysine residues shown to be implicated in the formation of charged ion pairs with carboxyl groups on NADH-cytochrome b5 reductase during interactions between the active sites of cytochrome b5 and NADH-cytochrome b5 reductase are conserved in the protein of the invention at positions 46, 112 and 150 (Strittmatter, P. et al. (1990) J. Biol. Chem. 265: 21709-13). In addition, the protein of the invention exhibits emotif signatures for cytochrome b5 reductase from positions 123 to 138, 163 to 180, and 256 to 265, emotif signatures for eukaryotic molybdopterin oxidoreductases from positions 256 to 266 and 256 to 268, and emotif signatures for flavoprotein pyridine nucleotide cytochrome reductases from positions 110 to 120, 163 to 177, and 163 to 179.

[0326] NADH-cytochrome b5 reductase proteins belong to a flavoenzyme family sharing common structural features and whose members (ferrodoxin-NADP+reductase, NADPH-cytochrome P450 reductase, NADPH-sulfite reductase, NADH-cytochrome b5 reductase and NADH-nitrate reductase) are involved in photosynthesis, in the assimilation of nitrogen and sulfur, in fatty-acid oxidation, in the reduction of methemoglobin and in the metabolism of many pesticides, drugs and carcinogens (Karplus et al., Science, 251:60-6 (1991)). In addition, cytochrome b5 reductase is thought to play a role in the prevention of apoptosis following oxidative stress (see review by Villalba et al., Mol Aspects Med 18 Suppl1:S7-13 (1997)).

[0327] It is believed that the protein of SEQ ID NO:427 may be an oxidoreductase. Thus it may play a role in electron transport and general aerobic metabolism and may be associated with mitochondrial membranes. In addition, the protein of the invention may be able to use FAD and/or molybdopterin as cofactors. It may be involved in photosynthesis, in the assimilation of nitrogen and sulfur, in fatty-acid oxidation, in the reduction of methemoglobin and in the metabolism of many pesticides, drugs and carcinogens. Preferred polypeptides of the SEQ ID NO:427 from positions 118 to 148, 157 to 192, 123 to 138, 163 to 180, 256 to 265, 256 to 266, 256 to 268, 110 to 120, 163 to 177, and 163 to 179. Other preferred polypeptides of the invention are fragments of SEQ ID NO:427 having any of the biological activity described herein. The oxidoreductase activity of the protein of the invention may be assayed using any technique known to those skilled in the art. The ability to bind a cofactor may also be assayed using any techniques well known to those skilled in the art including, for example, the assay for binding NAD described in U.S. Pat. No. 5,986,172.

[0328] An object of the present invention are compositions and methods of targeting heterologous compounds, either polypeptides or polynucleotides to mitochondria by recombinantly or chemically fusing a fragment of the protein of the invention to an heterologous polypeptide or polynucleotide. Preferred fragments are signal peptide, amphiphilic alpha helices and/or any other fragments of the protein of the invention, or part thereof, that may contain targeting signals for mitochondria including but not limited to matrix targeting signals as defined in Herrman and Neupert, Curr. Opinion Microbiol. 3:210-4 (2000); Bhagwat et al. J. Biol. Chem. 274:24014-22 (1999), Murphy Trends Biotechnol. 15:326-30 (1997); Glaser et al. Plant Mol Biol 38:311-38 (1998); Ciminale et al. Oncogene 18:4505-14 (1999). Such heterologous compounds may be used to modulate mitochondria's activities. For example, they may be used to induce and/or prevent mitochondrial-induced apoptosis or necrosis. In addition, heterologous polynucleotides may be used for mitochondrial gene therapy to replace a defective mitochondrial gene and/or to inhibit the deleterious expression of a mitochondrial gene.

[0329] In another embodiment, the protein of the invention or part thereof is used to prevent cells to undergo apoptosis. In a preferred embodiment, the apoptosis active polypeptide is added to an in vitro culture of mammalian cells in an amount effective to reduce apoptosis. Furthermore, the protein of the invention or part thereof may be useful in the diagnosis, the treatment and/or the prevention of disorders in which apoptosis is deleterious, including but not limited to immune deficiency syndromes (including AIDS), type I diabetes, pathogenic infections, cardiovascular and neurological injury, alopecia, aging, degenerative diseases such as Alzheimer's Disease, Parkinson's Disease, Huntington's disease, dystonia, Leber's hereditary optic neuropathy, schizophrenia, and myodegenerative disorders such as “mitochondrial encephalopathy, lactic acidosis, and stroke” (MELAS), and “myoclonic epilepsy ragged red fiber syndrome” (MERRF).

[0330] The invention further relates to methods and compositions using the protein of the invention or part thereof to diagnose, prevent and/or treat several disorders in which energy metabolism is impaired, or needs to be impaired, including but not limited to mitochondriocytopathies, necrosis, aging, neurodegenerative diseases, myopathies, methemoglobinemia, hyperlipidemia, obesity, cardiovascular disorders and cancer. For diagnostic purposes, the expression of the protein of the invention could be investigated using any of the Northern blotting, RT-PCR or immunoblotting methods described herein and compared to the expression in control individuals. For prevention and/or treatment purposes, the protein of the invention may be used to enhance electron transport and increase energy delivery using any of the gene therapy methods described herein.

[0331] Protein of SEQ ID NO:445 (Internal Designation 108-014-5-0-C7-FLC)

[0332] The protein of SEQ ID NO:445 encoded by the extended cDNA SEQ ID NO:40 shows homology with a fragment of a cold active protease isolated from Flavobacterium balustinum (Genseq accession number W23332) which degrades casein, gelatin, haemoglobin and albumin. This protease is able to degrade proteins at low temperatures or in presence of organic solvents that are volatile at normal processing temperature.

[0333] These data suggest that the protein of SEQ ID NO:445 or part thereof is an hydrolase, preferably a protease. Preferred polypeptides of the invention are polypeptides comprising the amino acids of SEQ ID NO:445 from positions 1 to 44. Other preferred polypeptides of the invention are fragments of SEQ ID NO:445 having any of the biological activity described herein. The hydrolytic activity of the protein of the invention or part thereof may be assayed using any of the assays known to those skilled in the art including those described in U.S. Pat. No. 6,069,229.

[0334] The invention relates to methods and compositions using the protein of the invention or part thereof to hydrolyze one or several substrates, alone or in combination with other substances. Such substrates are compounds containing peptide bonds. For example, the protein of the invention or part thereof is added to a sample containing the substrate(s) in conditions allowing hydrolysis, and allowed to catalyze the hydrolysis of the substrate(s). In a preferred embodiment, the hydrolysis is carried out using a standard assay such as those described by the U.S. Pat. No. 6,069,229.

[0335] In a preferred embodiment, compositions comprising the protein of the present invention or part thereof are added to samples as a “cocktail” with other hydrolytic enzymes such as those described in U.S. Pat. Nos. 5,458,876 and 5,041,326. The advantage of using a cocktail of hydrolytic enzymes is that one is able to hydrolyze a wide range of substrates without knowing the specificity of any of the enzymes. Using a cocktail of hydrolytic enzymes also protects a sample from a wide range of future unknown protein contaminants from a vast number of sources. For example, the protein of the invention or part thereof is added to samples where contaminating substrates is undesirable. For example, the protein of the invention or part thereof may be used to remove protein contaminants from nucleic acid preparations, to remove cells from cultureware. Alternatively, the protein of the invention or part thereof may be bound to a chromatographic support, either alone or in combination with other hydrolytic enzymes, using techniques well known in the art, to form an affinity chromatography column. A sample containing the undesirable substrate is run through the column to remove the substrate. Immobilizing the protein of the invention or part thereof on a support is particularly advantageous for those embodiments in which the method is to be practiced on a commercial scale. This immobilization facilitates the removal of the enzyme from the batch of product and subsequent reuse of the enzyme. Immobilization of the protein of the invention or part thereof can be accomplished, for example, by inserting a cellulose-binding domain in the protein. One of skill in the art will understand that other methods of immobilization could also be used and are described in the available literature. Alternatively, the same methods may be used to identify new substrates.

[0336] The protease of the invention may be used in many industrial processes, including in detergents and cleaning products, e.g., to degrade protein materials such as blood and stains or to clean contact lenses, in leather production, e.g., to remove hair, in baking, e.g., to break down glutens, in flavorings, e.g., soy sauce, in meat tenderizing, e.g., to break down collagen, in gelatin or food supplement production, in the textile industry, in waste treatment, and in the photographic industry. See, e.g., Gusek (1991) Inform 1:14-18; Zamost, et al. (1996) J. Industrial Microbiol. 8:71-82; James and Simpson (1996) CRC Critical Reviews in Food Science and Nutrition 36:437-463; Teichgraeber, et al. (1993) Trends in Food Science and Technology 4:145-149; Tjwan, et al. (1993) J. Dairy Research 60:269-286; Haard (1992) J. Aquatic Food Product Technology 1:17-35; van Dijk (1995) Laundry and Cleaning News 21:32-33; Nolte, et al. (1996) J. Textile Institute 87:212-226; Chikkodi, et al. (1995) Textile Res. J. 65:564-569; and Shih (1993) Poultry Science 72:1617-1620; PCT publication WO9925 848-Al.

[0337] In addition, the protein of the invention or part thereof may be used to identify inhibitors for mechanistic and clinical applications. Such inhibitors may then be used to identify or quantify the protein of the invention in a sample, and to diagnose, treat or prevent any of the disorders where the protein's hydrolytic activity is undesirable and/or deleterious such as disorders characterized by tissue degradation including but not limited to amyloidosis, colitis, lysosomal diseases, arthritis, muscular dystrophy, inflammation, tumor invasion, glomerulonephritis, parasite-borne infections, Alzheimer's disease, periodontal disease, and cancer metastasis.

[0338] Protein of SEQ ID NO:413 (Internal Designation 116-047-3-0-B1-FLC)

[0339] The protein of SEQ ID NO:413 encoded by the extended cDNA SEQ ID NO:8 shows homology with the ribokinase rbsk (Embl accession number Q9X4M5) which is part of the pfkb family of kinases. In addition, the protein of the invention exhibits the pfam signature for this family of carbohydrate and purine kinases from positions 28 to 94.

[0340] The pfkb family of carbohydrate kinase is composed of evolutionary related kinases including fructokinases, ribokinase, adenosine kinase, inosine-guanosine kinase, and phosphotagatokinase (for a short review see Prosite entry N° PD0C00504).

[0341] It is believed that the protein of SEQ ID NO:413 or part thereof is a carbohydrate or purine kinase. Preferred polypeptides of the invention are polypeptides comprising the amino acids of SEQ ID NO:413 from positions 28 to 94, and from 1 to 94. Other preferred polypeptides of the invention are fragments of SEQ ID NO:413 having any of the biological activity described herein. The kinase activity of the protein of the invention or part thereof may be assayed using any of the assays known to those skilled in the art including those described by the U.S. Pat. Nos. 5,756,315 and 5,861,294.

[0342] The invention relates to methods and compositions using the protein of the invention or part thereof to phosphorylate substrates, preferably carbohydrate or purine substrates. For example, the protein of the invention or part thereof is added to a sample containing the substrate(s) as well as a phosphate donor group in conditions allowing the transfer of the phosphorus group, and allowed to transfer the phosphorus group to the substrate(s). In a preferred embodiment, the kination is carried out using a standard assay including those described by the U.S. Pat. Nos. 5,756,315 and 5,861,294. Such phosphorylated purine substrates, such as 5′-IMP and 5′-GMP, have an enhanced flavor activity and may be used as seasoning agents.

[0343] In another embodiment, the present invention relates to processes and compositions for controlling the production of phosphorylated substrates, preferably carbohydrate and purine substrates, more preferably glucose, fructose, inosine, guanosine, adenosine, wherein a cell or an organism is an organism is genetically engineered either to produce the protein of the invention or part thereof or to inhibit the endogenous expression of the protein of the invention or part thereof using methods and techniques known to those skilled in the art including those described in U.S. Pat. No. 6,031,154. For example, a plant may be genetically engineered to express the protein of the invention or part thereof, thereby increasing the amount of phosphorylated carbohydrate substrates to be imported into plastids and ultimately enhancing starch biosynthesis. On the contrary, a fruit may also be genetically engineered to inhibit the endogenous expression of the protein of the invention in order to increase the concentration of non phosphorylated carbohydrates, ultimately leading to fruits with enhanced sweetness.

[0344] The invention further relates to methods and composition using the protein of the invention or part thereof to diagnose, prevent and/or treat disorders in which the availability of phosphorylated substrates, preferably carbohydrate and purine substrates, is impaired or needs to be impaired. In a preferred embodiment, the protein of the invention or part thereof may be used to activate pharmacologically active nucleosides including but not limited to tubercidin, formycin, ribavirin, pyrazofurin and 6-(methylmercapto) purine riboside which are antimetabolites with cytotoxic, anticancer and antiviral properties. In another preferred embodiment, the protein of the invention or part thereof may be used to compensate alterations observed in endogenous adenosine kinase activity observed in certain disorders including but not limited to hepatoma, hepatectomy, gout, and HIV infection. In still another preferred embodiment, the protein of the invention or part thereof may be used to modulate the concentration of adenosine which was shown to play important physiological roles. In the central nervous system, adenosine inhibits the release of certain neurotransmitters (Corradetti et al., Eur. J. Pharmacol. 1984, 104: 19-26), stabilizes membrane potential (Rudolphi et al., Cerebrovasc. Brain Metab. Rev. 1992, 4: 346-360), functions as an endogenous anticonvulsant (Dragunow, Trends Pharmacol. Sci. 1986, 7:128-130) and may have a role as an endogenous neuroprotective agent (Rudolphi et al., Trends Pharmacol. Sci. 1992, 13: 439-445). Adenosine has also been implicated in modulating transmission in pain pathways in the spinal cord (Sawynok et al., Br. J. Pharmacol. 1986, 88: 923-930), and in mediating the analgesic effects of morphine (Sweeney et al., J. Pharmacol. Exp. Ther. 1987, 243: 657-665). In the immune system, adenosine inhibits certain neutrophil functions and exhibits anti-inflammatory effects (Cronstein, J. Appl. Physiol. 1994, 76: 5-13). Adenosine also exerts a variety of effects on the cardiovascular system, including vasodilation, impairment of atrioventricular conduction and endogenous cardioprotection in myocardial ischemia and reperfusion (Mullane and Williams, in Adenosine and Adenosine Receptors 1990 (Williams, ed) Humana Press, New Jersey, pp. 289-334). The widespread actions of adenosine also include effects on the renal, respiratory, gastrointestinal and reproductive systems, as well as on blood cells and adipocytes. Endogenous adenosine release appears to have a role as a natural defense mechanism in various pathophysiologic conditions, including cerebral and myocardial ischemia, seizures, pain, inflammation and sepsis. While adenosine is normally present at low levels in the extracellular space, its release is locally enhanced at the site(s) of excessive cellular activity, trauma or metabolic stress. Once in the extracellular space, adenosine activates specific extracellular receptors to elicit a variety of responses which tend to restore cellular function towards normal (Bruns, Nucleosides Nucleotides, 1991, 10: 931-943; Miller and Hsu, J. Neurotrauma, 1992, 9: S563-S577). Adenosine has a half-life measured in seconds in extracellular fluids (Moser et al., Am. J. Physiol. 1989, 25: C799-C806), and its endogenous actions are therefore highly localized. The inhibition of adenosine kinase can result in augmentation of the local adenosine concentrations at foci of tissue injury, further enhancing cytoprotection. This effect is likely to be most pronounced at tissue sites where trauma results in increased adenosine production, thereby minimizing systemic toxicities. Pharmacological compounds directed towards adenosine kinase inhibition provide potential effective new therapies for disorders benefited by the site- and event-specific potentiation of adenosine.

[0345] Protein of SEQ ID NO:439 (Internal Designation 108-011-5-0-C7-FLC)

[0346] The protein of SEQ ID NO:439 encoded by the extended cDNA SEQ ID NO:34 shows homology with the chicken ribonuclease A (Embl accession number X61192) which is part of the pancreatic ribonuclease family. In addition, the protein of the invention exhibits the pfam signature for this family of pancreatic ribonucleases from positions 17 to 67.

[0347] Ribonucleases are proteins which catalyze the hydrolysis of phosphodiester bonds in RNA chains. Pancreatic ribonucleases are pyrimidic-specific ribonucleases present in high quantity in the pancreas of a number of mammalia taxa and of a few reptiles. In addition to their function in hydrolysis of RNA, ribonucleases have evolved to support a variety of other physiological activities. Such activities include anti-parasite, anti-bacterium, anti-virus, anti-neoplastic activities, neurotoxicity, and angiogenesis. For example, bovine seminal ribonuclease is anti-neoplastic (Laceetti, P. et al. (1992) Cancer Res. 52: 4582-4586). Some frog ribonucleases display both anti-viral and anti-neoplastic activity (Youle, R. J. et al. (1994) Proc. Natl. Acad. Sci. USA 91: 6012-6016; Mikulski, S. M. et al. (1990) J. Natl. Cancer Inst. 82: 151-152; and Wu, Y.-N. et al. (1993) J. Biol. Chem. 268: 10686-10693). Angiogenin is a tRNA-specific ribonuclease which binds actin on the surface of endothelial cells for endocytosis. Endocytosed angiogenin is translocated to the nucleus where it promotes endothelial invasiveness required for blood vessel formation (Moroianu, J. and Riordan, J. F. (1994) Proc. Natl. Acad. Sci. USA 91: 1217-1221). Eosinophil-derived neurotoxin (EDN) and eosinophil cationic protein (ECP) are related ribonucleases which possess neurotoxicity (Beintema, J. J. et al. (1988) Biochemistry 27: 4530-4538; Ackerman, S. J. (1993) In Makino, S. and Fukuda, T., Eosinophils: Biological and Clinical Aspects. CRC Press, Boca Raton, Fla., pp 33-74). In addition, ECP exhibits cytotoxic, anti-parasitic, and anti-bacterial activities. A EDN-related ribonuclease, named RNase k6, is shown to express in normal human monocytes and neutrophils, suggesting a role for this ribonuclease in host defense (Rosenberg, H. F. and Dyer, K. D. (1996) Nuc. Acid. Res. 24: 3507-3513).

[0348] It is believed that the protein of SEQ ID NO:439 or part thereof is a ribonuclease. Preferred polypeptides of the invention are polypeptides comprising the amino acids of SEQ ID NO:439 from positions 17 to 67. Other preferred polypeptides of the invention are fragments of SEQ ID NO:439 having any of the biological activity described herein. The ribonuclease activity of the protein of the invention or part thereof may be assayed using any of the assays known to those skilled in the art including those described in U.S. Pat. No. 5,866,119.

[0349] The invention relates to methods and compositions using the protein of the invention or part thereof to hydrolyze one or several substrates, preferably nucleic acids, more preferably RNA, alone or in combination with other substances. For example, the protein of the invention or part thereof is added to a sample containing the substrate(s) in conditions allowing hydrolysis, and allowed to catalyze the hydrolysis of the substrate(s).

[0350] In a preferred embodiment, the protein of the invention or part thereof may be used to remove contaminating RNA in a biological sample, alone or in combination with other nucleases. In a more preferred embodiment, the protein of the invention or part thereof may be used to purify DNA preparations from contaminating RNA, to remove RNA templates prior to second strand synthesis and prior to analysis of in vitro translation products. Compositions comprising the protein of the present invention or part thereof are added to biological samples as a “cocktail” with other nucleases. The advantage of using a cocktail of hydrolytic enzymes is that one is able to hydrolyze a wide range of substrates without knowing the specificity of any of the enzymes. Such cocktails of nucleases are commonly used in molecular biology assays, for example to remove unbound RNA in RNAse protection assays. Using a cocktail of hydrolytic enzymes also protects a sample from a wide range of future unknown RNA contaminants from a vast number of sources. For example, the protein of the invention or part thereof is added to samples where contaminating substrates is undesirable. Alternatively, the protein of the invention or part thereof may be bound to a chromatographic support, either alone or in combination with other hydrolytic enzymes, using techniques well known in the art, to form an affinity chromatography column. A sample containing the undesirable substrate is run through the column to remove the substrate. Immobilizing the protein of the invention or part thereof on a support is particularly advantageous for those embodiments in which the method is to be practiced on a commercial scale. This immobilization facilitates the removal of the enzyme from the batch of product and subsequent reuse of the enzyme. Immobilization of the protein of the invention or part thereof can be accomplished, for example, by inserting a cellulose-binding domain in the protein. One of skill in the art will understand that other methods of immobilization could also be used and are described in the available literature. Alternatively, the same methods may be used to identify new substrates.

[0351] In another embodiment, the protein of the invention or part thereof may be used to decontaminate or disinfect samples infected by undesirable parasite, bacteria and/or viruses using any of the methods known to those skilled in the art including those described in Youle et al, (1994), supra; Mikulski et al (1990) supra, Wu et al (1993) supra.

[0352] In another embodiment, the present invention relates to compositions and methods using the protein of the invention or part thereof to selectively kill cells. The protein of the invention or part thereof is linked to a recognition moiety capable of binding to a chosen cell, such as lectins, receptors or antibodies thus generating cytotoxic reagents using methods and techniques described in U.S. Pat. No. 5,955,073.

[0353] In another embodiment, the protein of the invention or part thereof may be used in the diagnosis, prevention and/or treatment of disorders associated with excessive cell proliferation such as cancer.

[0354] Protein of SEQ ID NO:409 (Internal Designation 105-118-4-0-E6-FLC)

[0355] The protein of SEQ ID NO:409 encoded by the extended cDNA SEQ ID NO:4 is homologous to a hepatocellular carcinoma associated ring finger protein (Embl accession number AF247565) and homology with a putative anaphase-promoting complex subunit from Drosophila (Embl accession number AJ251510). In addition, the protein of the invention exhibits the pfam PHD zinc finger signature from positions 33 to 79.

[0356] Zinc finger domains are found in numerous zinc binding proteins which are involved in protein-nucleic acid interactions. They are independently folded zinc-containing mini-domains which are used in a modular repeating fashion to achieve sequence-specific recognition of DNA (Klug 1993 Gene 135, 83-92). Such zinc binding proteins are commonly involved in the regulation of gene expression, and usually serve as transcription factors (see U.S. Pat. Nos. 5,866,325; 6,013,453 and 5,861,495). PHD fingers are C₄HC₃ zinc fingers spanning approximately 50-80 residues and distinct from RING fingers or LIM domains. They are thought to be mostly DNA or RNA binding domain but may also be involved in protein-protein interactions (for a review see Aasland et al, Trends Biochem Sci 20:56-59 (1995)).

[0357] It is believed that the protein of SEQ ID NO:409 or part thereof is a zinc binding protein, preferably able to bind nucleic acids, more preferably a transcription factor. Preferred polypeptides of the invention are polypeptides comprising the amino acids of SEQ ID NO:409 from positions 33 to 79. Other preferred polypeptides of the invention are fragments of SEQ ID NO:409 having any of the biological activity described herein. The nucleic acid binding activity of the protein of the invention or part thereof may be assayed using any of the assays known to those skilled in the art including those described in U.S. Pat. No. 6,013,453.

[0358] The invention relates to methods and compositions using the protein of the invention or part thereof to bind to nucleic acids, preferably DNA, alone or in combination with other substances. For example, the protein of the invention or part thereof is added to a sample containing nucleic acid in conditions allowing binding, and allowed to bind to nucleic acids. In a preferred embodiment, the protein of the invention or part thereof may be used to purify nucleic acids such as restriction fragments. In another preferred embodiment, the protein of the invention or part thereof may be used to visualize nucleic acids when the polypeptide is linked to an appropriate fusion partner, or is detected by probing with an antibody. Alternatively, the protein of the invention or part thereof may be bound to a chromatographic support, either alone or in combination with other DNA binding proteins, using techniques well known in the art, to form an affinity chromatography column. A sample containing nucleic acids to purify is run through the column. Immobilizing the protein of the invention or part thereof on a support advantageous is particularly for those embodiments in which the method is to be practiced on a commercial scale. This immobilization facilitates the removal of the protein from the batch of product and subsequent reuse of the protein. Immobilization of the protein of the invention or part thereof can be accomplished, for example, by inserting a cellulose-binding domain in the protein. One of skill in the art will understand that other methods of immobilization could also be used and are described in the available literature.

[0359] In another embodiment, the present invention relates to compositions and methods using the protein of the invention or part thereof, especially the zinc binding domain, to alter the expression of genes of interest in a target cells. Such genes of interest may be disease related genes, such as oncogenes or exogenous genes from pathogens, such as bacteria or viruses using any techniques known to those skilled in the art including those described in U.S. Pat. Nos. 5,861,495; 5,866,325 and 6,013,453.

[0360] In still another embodiment, the protein of the invention or part thereof may be used to diagnose, treat and/or prevent disorders linked to dysregulation of gene transcription such as cancer and other disorders relating to abnormal cellular differentiation, proliferation, or degeneration, including hyperaldosteronism, hypocortisolism (Addison's disease), hyperthyroidism (Grave's disease), hypothyroidism, colorectal polyps, gastritis, gastric and duodenal ulcers, ulcerative colitis, and Crohn's disease.

[0361] Protein of SEQ ID NO:446 (Internal Designation 108-014-5-0-D12-FLC)

[0362] The protein of SEQ ID NO:446 encoded by the extended cDNA SEQ ID NO:41 shows homology with zinc binding proteins (Embl accession number Q9QZQ6 and Genseq accession number W69602). In addition, the protein of the invention exhibits the pfam RING zinc finger signature from positions 258 to 298.

[0363] Zinc binding (ZB) domains are found in numerous proteins which are involved in protein-nucleic acid or protein-protein interactions. ZB proteins are commonly involved in the regulation of gene expression, and may serve as transcription factors and signal transduction molecules. A ZB domain is generally composed of 25 to 30 amino acid residues which form one or more tetrahedral ion binding sites. The binding sites contain four ligands consisting of the sidechains of cysteine, histidine and occasionally aspartate or glutamate. The binding of zinc allows the relatively short stretches of polypeptide to fold into defined structural units which are well-suited to participate in macromolecular interactions (Berg, J. M. et al. (1996) Science 271:1081-1085). Zinc binding domains which contain a C₃HC₄ sequence motif are known as RING domains (Lovering, R. et al. (1993) Proc. Natl. Acad. Sci. USA 90:2112-2116). The RING domain consists of eight metal binding residues, and the sequences that bind the two metal ions overlap (Barlow, P. N. et al. (1994) J. Mol. Biol. 237:201-211). Functions of RING finger proteins are mediated through DNA binding and include the regulation of gene expression, DNA recombination, and DNA repair (see Borden and Freemont, Curr Opin Struct Biol 6:395-401 (1996) and U.S. Pat. No. 5,861,495).

[0364] It is believed that the protein of SEQ ID NO:446 or part thereof is a zinc binding protein, preferably able to bind nucleic acids or proteins, more preferably a transcription factor. Preferred polypeptides of the invention are polypeptides comprising the amino acids of SEQ ID NO:446 from positions 258 to 298. Other preferred polypeptides of the invention are fragments of SEQ ID NO:446 having any of the biological activity described herein. The nucleic acid binding activity of the protein of the invention or part thereof may be assayed using any of the assays known to those skilled in the art including those described in U.S. Pat. No. 6,013,453.

[0365] The invention relates to methods and compositions using the protein of the invention or part thereof to bind to nucleic acids, preferably DNA, alone or in combination with other substances. For example, the protein of the invention or part thereof is added to a sample containing nucleic acid in conditions allowing binding, and allowed to bind to nucleic acids. In a preferred embodiment, the protein of the invention or part thereof may be used to purify nucleic acids such as restriction fragments. In another preferred embodiment, the protein of the invention or part thereof may be used to visualize nucleic acids when the polypeptide is linked to an appropriate fusion partner, or is detected by probing with an antibody. Alternatively, the protein of the invention or part thereof may be bound to a chromatographic support, either alone or in combination with other DNA binding proteins, using techniques well known in the art, to form an affinity chromatography column. A sample containing nucleic acids to purify is run through the column. Immobilizing the protein of the invention or part thereof on a support advantageous is particularly for those embodiments in which the method is to be practiced on a commercial scale. This immobilization facilitates the removal of the protein from the batch of product and subsequent reuse of the protein. Immobilization of the protein of the invention or part thereof can be accomplished, for example, by inserting a cellulose-binding domain in the protein. One of skill in the art will understand that other methods of immobilization could also be used and are described in the available literature.

[0366] In another embodiment, the present invention relates to compositions and methods using the protein of the invention or part thereof, especially the zinc binding domain, to alter the expression of genes of interest in a target cells. Such genes of interest may be disease related genes, such as oncogenes or exogenous genes from pathogens, such as bacteria or viruses using any techniques known to those skilled in the art including those described in U.S. Pat. Nos. 5,861,495; 5,866,325 and 6,013,453.

[0367] In still another embodiment, the protein of the invention or part thereof may be used to diagnose, treat and/or prevent disorders linked to dysregulation of gene transcription such as cancer and other disorders relating to abnormal cellular differentiation, proliferation, or degeneration, including hyperaldosteronism, hypocortisolism (Addison's disease), hyperthyroidism (Grave's disease), hypothyroidism, colorectal polyps, gastritis, gastric and duodenal ulcers, ulcerative colitis, and Crohn's disease.

### Protein of SEQ ID NO:437 (Internal Designation 108-008-5-0-G5-FLC)

[0368] The protein of SEQ ID NO:437 encoded by the extended cDNA SEQ ID NO:32 shows homology with zinc binding proteins (Embl accession number Q9VZJ9). In addition, the protein of the invention exhibits the pfam RING zinc finger signature from positions 302 to 339.—

[0369] Zinc binding (ZB) domains are found in numerous proteins which are involved in protein-nucleic acid or protein-protein interactions. ZB proteins are commonly involved in the regulation of gene expression, and may serve as transcription factors and signal transduction molecules. A ZB domain is generally composed of 25 to 30 amino acid residues which form one or more tetrahedral ion binding sites. The binding sites contain four ligands consisting of the sidechains of cysteine, histidine and occasionally aspartate or glutamate. The binding of zinc allows the relatively short stretches of polypeptide to fold into defined structural units which are well-suited to participate in macromolecular interactions (Berg, J. M. et al. (1996) Science 271:1081-1085). Zinc binding domains which contain a C₃HC₄ sequence motif are known as RING domains (Lovering, R. et al. (1993) Proc. Natl. Acad. Sci. USA 90:2112-2116). The RING domain consists of eight metal binding residues, and the sequences that bind the two metal ions overlap (Barlow, P. N. et al. (1994) J. Mol. Biol. 237:201-211). Functions of RING finger proteins are mediated through DNA binding and include the regulation of gene expression, DNA recombination, and DNA repair (see Borden and Freemont, Curr Opin Struct Biol 6:395-401 (1996) and U.S. Pat. No. 5,861,495).

[0370] It is believed that the protein of SEQ ID NO:437 or part thereof is a zinc binding protein, preferably able to bind nucleic acids or proteins, more preferably a transcription factor. Preferred polypeptides of the invention are polypeptides comprising the amino acids of SEQ ID NO:437 from positions 302 to 339. Other preferred polypeptides of the invention are fragments of SEQ ID NO:437 having any of the biological activity described herein. The nucleic acid binding activity of the protein of the invention or part thereof may be assayed using any of the assays known to those skilled in the art including those described in U.S. Pat. No. 6,013,453.

[0371] The invention relates to methods and compositions using the protein of the invention or part thereof to bind to nucleic acids, preferably DNA, alone or in combination with other substances. For example, the protein of the invention or part thereof is added to a sample containing nucleic acid in conditions allowing binding, and allowed to bind to nucleic acids. In a preferred embodiment, the protein of the invention or part thereof may be used to purify nucleic acids such as restriction fragments. In another preferred embodiment, the protein of the invention or part thereof may be used to visualize nucleic acids when the polypeptide is linked to an appropriate fusion partner, or is detected by probing with an antibody. Alternatively, the protein of the invention or part thereof may be bound to a chromatographic support, either alone or in combination with other DNA binding proteins, using techniques well known in the art, to form an affinity chromatography column. A sample containing nucleic acids to purify is run through the column. Immobilizing the protein of the invention or part thereof on a support advantageous is particularly for those embodiments in which the method is to be practiced on a commercial scale. This immobilization facilitates the removal of the protein from the batch of product and subsequent reuse of the protein. Immobilization of the protein of the invention or part thereof can be accomplished, for example, by inserting a cellulose-binding domain in the protein. One of skill in the art will understand that other methods of immobilization could also be used and are described in the available literature.

[0372] In another embodiment, the present invention relates to compositions and methods using the protein of the invention or part thereof, especially the zinc binding domain, to alter the expression of genes of interest in a target cells. Such genes of interest may be disease related genes, such as oncogenes or exogenous genes from pathogens, such as bacteria or viruses using any techniques known to those skilled in the art including those described in U.S. Pat. Nos. 5,861,495; 5,866,325 and 6,013,453.

[0373] In still another embodiment, the protein of the invention or part thereof may be used to diagnose, treat and/or prevent disorders linked to dysregulation of gene transcription such as cancer and other disorders relating to abnormal cellular differentiation, proliferation, or degeneration, including hyperaldosteronism, hypocortisolism (Addison's disease), hyperthyroidism (Grave's disease), hypothyroidism, colorectal polyps, gastritis, gastric and duodenal ulcers, ulcerative colitis, and Crohn's disease.

[0374] Protein of SEQ ID NO:438 (Internal Designation 108-011-5-0-B12-FL)

[0375] The protein of SEQ ID NO:438 encoded by the extended cDNA SEQ ID NO:33 shows homology to the predicted extracellular domain and part of transmembrane domain of interleukin-17 receptor of both human and murine species (Genbank accession numbers WO4185 and WO4184). These IL-17R proteins are thought to belong to a new family of receptors for cytokines which induce T cell proliferation, I-CAM expression and preferential maturation of haematopoietic precursors into neutrophils (Yao et al., Cytokine., 9:794-8001 (1997)). It is also thought to play a proinflammatory role and to induce nitric oxide. The protein of the invention has a 21 amino acid transmembrane domain (positions 172 to 192) as predicted by the software TopPred II (Claros and von Heijne, CABIOS applic. Notes, 10:685-686 (1994)) matching the 21 amino acid putative transmembrane domain of human interleukin-17 receptor.

[0376] It is believed that the protein of SEQ ID NO:438 plays a role in regulating immune and/or inflammatory responses. Preferred polypeptides of the invention are fragments of SEQ ID NO:438 having any of the biological activities described herein.

[0377] The present invention relates to methods and compositions using the protein of the invention or part thereof to inhibit the proliferation and/or the differentiation of lymphocytes or lymphocytic cell lines, both in vitro and in vivo. For example, soluble forms of the protein of the invention or part thereof may be added to cell culture medium in an amount effective to inhibit the proliferation and/or the differentiation of lymphocytes and/or lymphocytic cell lines.

[0378] Another embodiment relates to methods and compositions using the protein of the invention or part thereof to diagnose, treat and/or prevent several disorders including, but not limited to, cancer, inflammatory and immune disorders, septic shock and impotence. Immune and inflammatory disorders include Addison's disease, AIDS, acute or chronic inflammation due to antigen, antibody and/or complement deposition, acute and delayed hypersensitivity, adult respiratory distress syndrome, allergies, anemia, arthritis, asthma, atherosclerosis, bronchitis, chalangitis, cholecystitus, Crohn's disease, ulcerative colitis, atopic dermatitis, dermatomyositis, diabetes mellitus, emphysema, encephalitis, endocarditis, atrophic gastritis, glomerulonephritis, gout, graft rejection, graft-versus-host disease, Graves' disease, hepatitis, hypereosinophilia, irritable bowel syndrome, lupus erythematosus, multiple sclerosis, myasthenia gravis, myocardial or pericardial inflammation, osteoarthritis, osteoporosis, pancreatitis, polycystic kidney disease, polymyositis, reperfusion injury, rheumatoid arthritis, scleroderma, Sjogren's syndrome, and autoimmune thyroiditis.

[0379] In addition, this protein may also be useful to modulate immune and/or inflammatory responses to infectious responses and/or to suppress graft rejection. For example, soluble forms of the protein of the invention or blocking antibodies, or antagonists may be used to inhibit and/or reduce immune and/or inflammatory responses.

[0380] Protein of SEQ ID NO:429 (Internal Designation 108-004-5-0-B12-FLC)

[0381] The protein of SEQ ID NO:429 encoded by the extended cDNA SEQ ID NO:24 is homologous to a human protein either described as a maid-like gene (Embl accession number 35 AF132000) or a human secreted protein (Geneseq accession number Y41330).

[0382] Maid is a maternally transcribed gene encoding a putative regulator of basic helix-loop-helix transcription factor in the mouse egg and zygote. In vitro, maid is able to bind to DNA. When transfected, maid reduces the transcription of a CAT-reporter regulated by an E12/MyoD enhancer (Hwang et al, Dev Dyn, 209:217-26 (1997)).

[0383] It is believed that the protein of SEQ ID NO:429 or part thereof is involved in the regulation of gene transcription, probably through direct binding to DNA. Preferred polypeptides of the invention are fragments of SEQ ID NO:429 having any of the biological activity described herein. The nucleic acid binding activity of the protein of the invention or part thereof may be assayed using any of the assays known to those skilled in the art including those described in U.S. Pat. No. 6,013,453.

[0384] The invention relates to methods and compositions using the protein of the invention or part thereof to bind to nucleic acids, preferably DNA, alone or in combination with other substances. For example, the protein of the invention or part thereof is added to a sample containing nucleic acid in conditions allowing binding, and allowed to bind to nucleic acids. In a preferred embodiment, the protein of the invention or part thereof may be used to purify nucleic acids such as restriction fragments. In another preferred embodiment, the protein of the invention or part thereof may be used to visualize nucleic acids when the polypeptide is linked to an appropriate fusion partner, or is detected by probing with an antibody. Alternatively, the protein of the invention or part thereof may be bound to a chromatographic support, either alone or in combination with other DNA binding proteins, using techniques well known in the art, to form an affinity chromatography column. A sample containing nucleic acids to purify is run through the column. Immobilizing the protein of the invention or part thereof on a support advantageous is particularly for those embodiments in which the method is to be practiced on a commercial scale. This immobilization facilitates the removal of the protein from the batch of product and subsequent reuse of the protein. Immobilizing the protein of the invention or part thereof on a support advantageous is particularly for those embodiments in which the method is to be practiced on a commercial scale. This immobilization facilitates the removal of the protein from the batch of product and subsequent reuse of the protein. Immobilization of the protein of the invention or part thereof can be accomplished, for example, by inserting a cellulose-binding domain in the protein. One of skill in the art will understand that other methods of immobilization could also be used and are described in the available literature.

[0385] In another embodiment, the present invention relates to compositions and methods using the protein of the invention or part thereof to alter the expression of genes of interest in a target cell. Such genes of interest may be disease related genes, such as oncogenes or exogenous genes from pathogens, such as bacteria or viruses using any techniques known to those skilled in the art including those described in U.S. Pat. Nos. 5,861,495; 5,866,325 and 6,013,453.

[0386] In still another embodiment, the protein of the invention or part thereof may be used to diagnose, treat and/or prevent disorders linked to dysregulation of gene transcription such as cancer and other disorders relating to abnormal cellular differentiation, proliferation, or degeneration, including hyperaldosteronism, hypocortisolism (Addison's disease), hyperthyroidism (Grave's disease), hypothyroidism, colorectal polyps, gastritis, gastric and duodenal ulcers, ulcerative colitis, and Crohn's disease.

[0387] Protein of SEQ ID NO:454 (Internal Designation 108-020-5-O-D4-FLC)

[0388] The protein of SEQ ID NO:454 encoded by the extended cDNA SEQ ID NO:49 shows homology to a murine transmembrane protein (Genbank accession number BAA92746). When expressed in E. Coli, the matched which suppresses bacterial growth (Inoue et al, Biochem Biophys Res Commun 268:553-61 (2000)). In addition, a transmembrane domain is predicted for the protein of SEQ ID NO:454 from positions 36 to 56 by the software TopPred II (Claros and von Heijne, CABIOS applic. Notes, 10:685-686 (1994).

[0389] It is believed that the protein of SEQ ID NO:454 or part thereof is able to suppress bacterial growth. Preferred polypeptides of the invention are fragments of SEQ ID NO:429 having any of the biological activity described herein. The growth inhibiting activity of the protein of the invention or part thereof may be assayed using any of the assays known to those skilled in the art including those described in Inoue et al, supra.

[0390] The invention relates to methods and compositions using the protein of the invention or part thereof to suppress bacterial growth. For example, the protein of the invention may be expressed in a bacteria, preferably E. coli, using recombinant DNA technology methods known to those skilled in the art. The bacterial growth may then be assessed using any methods or techniques known to those skilled in the art.

[0391] Protein of SEQ ID NO:428 (Internal Designation 122-007-3-0-D10-FLC)

[0392] The protein of SEQ ID NO:428 encoded by the extended cDNA SEQ ID NO:23 shows homology to a human secreted protein highly expressed in testis (Genseq accession number Y06940). In addition, it exhibits an emotif signature for the flagellar biosynthetic protein fliR 30 family from positions 7 to 27.

[0393] FliR is an integral membrane protein located in the flagellar basal body and thought to be a component of the type III export apparatus (Fan et al, Mol Microbiol 26:1035-46 (1997)).

[0394] It is believed that the protein of SEQ ID NO:428 or part thereof plays a role in gametogenesis, maybe as a component of spermatozoids. Preferred polypeptides of the invention are polypeptides comprising the amino acids of SEQ ID NO:428 from positions 7 to 27. Other preferred polypeptides of the invention are fragments of SEQ ID NO:428 having any of the biological activity described herein.

[0395] The invention relates to methods and compositions using the protein of the invention or part thereof to diagnose, treat and/or prevent fertility disorders. For diagnostic purposes, the expression of the protein of the invention could be investigated using any of the Northern blotting, RT-PCR or immunoblotting methods described herein and compared to the expression in control individuals. For prevention and/or treatment purposes, the protein of the invention may be used to enhance gametogenesis using any of the gene therapy methods described herein or known to those skilled in the art.

[0396] Moreover, antibodies to the protein of the invention or part thereof may be used for detection of gametes using any techniques known to those skilled in the art.

[0397] Protein of SEQ ID NO:442 (Internal Designation 108-013-5-0-G5-FLC)

[0398] The protein of SEQ ID NO:442 encoded by the extended cDNA SEQ ID NO:37 displays the pfam signature for the N-terminus of the alpha-macroglobulin A2M family from positions 17 to 40. A2M-like proteins are able to inhibit all four classes of proteinases by a “trapping mechanism” (see Prosite entry PS00477 for a short review).

[0399] It is believed that the protein of SEQ ID NO:442 or part thereof is a member of the alpha-2-macroglobulin family, more preferably a protease inhibitor. Preferred polypeptides of the invention are polypeptides comprising the amino acids of SEQ ID NO:442 from positions 17 to 40. Other preferred polypeptides of the invention are fragments of SEQ ID NO:425 having any of the biological activity described herein. The protease inhibitor activity of the protein of the invention or part thereof may be assessed using any techniques known to those skilled in the art.

[0400] The invention relates to compositions and methods using the protein of the invention or part thereof to inhibit proteases, both in vitro or in vivo. Since proteases play an important role in the regulation of many biological processes in virtually all living organisms as well as a major role in diseases, inhibitors of proteases are useful in a wide variety of applications.

[0401] In one embodiment, the protein of the invention or part thereof may be useful to quantify the amount of a given protease in a biological sample, and thus used in assays and diagnostic kits for the quantification of proteases in bodily fluids or other tissue samples, in addition to bacterial, fungal, plant, yeast, viral or mammalian cell cultures. In a preferred embodiment, the sample is assayed using a standard protease substrate. A known concentration of protease inhibitor is added, and allowed to bind to a particular protease present. The protease assay is then rerun, and the loss of activity is correlated to the protease inhibitor activity using techniques well known to those skilled in the art.

[0402] In addition, the protein of the invention or part thereof may be used to remove, identify or inhibit contaminating proteases in a sample. Compositions comprising the polypeptides of the present invention may be added to biological samples as a “cocktail” with other protease inhibitors to prevent degradation of protein samples. The advantage of using a cocktail of protease inhibitors is that one is able to inhibit a wide range of proteases without knowing the specificity of any of the proteases. Using a cocktail of protease inhibitors also protects a protein sample from a wide range of future unknown proteases which may contaminate a protein sample from a vast number of sources. For example, the protein of the invention or part thereof are added to samples where proteolytic degradation by contaminating proteases is undesirable. Such protease inhibitor cocktails (see for example the ready to use cocktails sold by Sigma) are widely used in research laboratory assays to inhibit proteases susceptible of degrading a protein of interest for which the assay is to be performed. Alternatively, the protein of the invention or part thereof may be bound to a chromatographic support, either alone or in combination with other protease inhibitor, using techniques well known in the art, to form an affinity chromatography column. A sample containing the undesirable protease is run through the column to remove the protease. Alternatively, the same methods may be used to identify new proteases.

[0403] In a preferred embodiment, the protein of the invention or part thereof may be used to inhibit proteases implicated in a number of diseases where cellular proteolysis occur such as diseases characterized by tissue degradation including but not limited to arthritis, muscular dystrophy, inflammation, tumor invasion, glomerulonephritis, parasite-borne infections, Alzheimer's disease, periodontal disease, and cancer metastasis.

[0404] In another preferred embodiment, the protein of the invention or part thereof may be useful to inhibit exogenous proteases, both in vivo and in vitro, implicated in a number of infectious diseases including but not limited to gingivitis, malaria, leishmaniasis, filariasis, osteoporosis and osteoarthritis, and other bacterial, and parasite-borne or viral infections. In particular, the protein of the invention or part thereof may offer applications in viral diseases where the proteolysis of primary polypeptide precursors is essential to the replication of the virus, as for HIV and HCV.

[0405] Furthermore, the protease inhibitors of the present invention find use in drug potentiation applications. For example, therapeutic agents such as antibiotics or antitumor drugs can be inactivated through proteolysis by endogenous proteases, thus rendering the administered drug less effective or inactive. Accordingly, the protease inhibitors of the invention may be administered to a patient in conjunction with a therapeutic agent in order to potentiate or increase the activity of the drug. This co-administration may be by simultaneous administration, such as a mixture of the protease inhibitor and the drug, or by separate simultaneous or sequential administration.

[0406] In addition, protease inhibitors have been shown to inhibit the growth of microorganisms including human pathogenic bacteria. For example, protease inhibitors are able to inhibit growth of all strains of group A streptococci, including antibiotic-resistant strains (Merigan, T. et al (1996) Ann Intern Med 124:1039-1050; Stoka, V. (1995) FEBS. Lett 370:101-104; Vonderfecht, S. et al (1988) J Clin Invest 82:2011-2016; Collins, A. et al (1991) Antimicrob Agents Chemother 35:2444-2446). Accordingly, the protease inhibitors of the present invention may be used as antibacterial agents to retard or inhibit the growth of certain bacteria either in vitro or in vivo. Particularly, the polypeptides of the present invention may be used to inhibit the growth of group A streptococci on non-living matter such as instruments not conducive to other methods of preventing or removing contamination by group A streptococci, and in culture of living plant, fungi, and animal cells.

[0407] Protein of SEQ ID NO:693

[0408] The protein of SEQ ID NO: 693 is encoded by the extended cDNA SEQ ID NO: 51. The protein of SEQ ID NO: 693 is human strictosidine synthase. Strictodine synthase is a key enzyme in the production of, and therefore useful in making, the pharmaceutically important monoterpene indole alkaloids. Pathways for the production of monoterpene indole alkaloids can be reconstructed in various cell types, for example, insect cell cultures as described in Kutchan, T. M. et al. (1994) Phyochemistry 35(2):353-360. Strictodine synthase can also be produced E. coli and its activity measuring using methods described in, for example, Roessner, C. A. et al. (1992) Protein Expr. Purif. 3(4):295-300; Kutchan, T. M. (1989) FEBS Lett. 257(1):127-130; Pennings, E. J. et al. (1989) Anal. Biochem. 176(2):412-415; Walton, N. J. (1987) Anal. Biochem. 163(2):482-488. Preferred fragments of SEQ ID NO: 693 and the mature polypeptide encoded by the corresponding human cDNA of the deposited clone are those with strictodine synthase activity. Further preferred are fragments with not less then 100 fold less activity, not less than 10 fold activity, and not less than 5 fold activity when compared to mature protein.

[0409] Protein of SEQ ID NO: 695

[0410] The protein of SEQ ID NO: 695, encoded by the extended cDNA SEQ ID NO: 53, is human inositol hexakisphophate kinase-2. Inositol hexakisphophate kinase-2 phosphorylates inositol hexakisphosphate (InsP(6)) to diphosphoinositol pentakisphosphate/inositol heptakisphosphate (InsP(7)), a high energy regulator of cellular trafficking. Human inositol hexakisphophate kinase-2 also stimulates the uptake of inorganic phosphate and its products act as energy reserves. Therefore, hexakisphosphate kinase-2 is an ATP synthase, and its product, diphosphoinositol pentakisphosphate, acts as a high-energy phosphate donor. The human inositol hexakisphophate kinase-2 gene may be transfected into eukaryotic cells (preferably mammalian, yeast, and insect cells) and expressed to increase their growth, viability, and for more efficient secretions of polypeptides, including recombinant polypeptides. Preferred fragments of SEQ ID NO: 695 and the corresponding mature polypeptide encoded by the human cDNA of the deposited clone are those with inositol hexakisphophate kinase-2 activity. Further preferred are fragments with not less then 100 fold less activity, not less than 10 fold activity, and not less than 5 fold activity when compared to mature protein.

[0411] Proteins of SEQ ID NOs: 697 and 727:

[0412] The proteins of SEQ ID NOs: 697 and 727 encoded by the extended cDNA SEQ ID NOs: 55 and 85, respectively, are MEK binding partners. These proteins enhance enzymatic activation of mitogen-activated protein (MAP) kinase cascade. The MAP kinase pathway is one of the important enzymatic cascade that is conserved among all eukaryotes from yeast to human. This kind of pathway is involved in vital functions such as the regulation of growth, differentiation and apoptosis. These proteins are believed to act by facilitating the interaction of the two sequentially acting kinases MEKI and ERKI (Schaffer et al., Science, 281:1668-1671 (1998)).

[0413] Thus, the proteins of SEQ ID NO: 697 and 727 are involved in regulating protein-protein interaction in the signal transduction pathways. These proteins may be useful in diagnosing and/or treating several types of disorders including, but not limited to, cancer, neurodegenerative diseases, cardiovascular disorders, hypertension, renal injury and repair and septic shock. More specifically, over expression and mutant forms of this gene can serve as markers for cancer, such as ovarian cancer, using the nucleic acid as a probe or by using antibodies directed to the protein. Cells transfected with this gene have increased growth rate.

[0414] Protein of SEQ ID NO: 698

[0415] The protein of SEQ ID NO: 698, encoded by the extended cDNA SEQ ID NO: 56, is a new claudin named Claudin-50.

[0416] Cell adhesion is a complex process that is important for maintaining tissue integrity and generating physical and permeability barriers within the body. All tissues are divided into discrete compartments, each of which is composed of a specific cell type that adheres to similar cell types. Such adhesion triggers the formation of intercellular junctions (i.e., readily definable contact sites on the surfaces of adjacent cells that are adhering to one another), also known as tight junctions, gap junctions, spot desmosomes and belt desmosomes. The formation of such junctions gives rise to physical and permeability barriers that restrict the free passage of cells and other biological substances from one tissue compartment to another. For example, the blood vessels of all tissues are composed of endothelial cells. In order for components in the blood to enter a given tissue compartment, they must first pass from the lumen of a blood vessel through the barrier formed by the endothelial cells of that vessel. Similarly, in order for substances to enter the body via the gut, the substances must first pass through a barrier formed by the epithelial cells of that tissue. To enter the blood via the skin, both epithelial and endothelial cell layers must be crossed.

[0417] The transmembrane component of tight junctions that has been the most studied is occluding. Occludin is believed to be directly involved in cell adhesion and the formation of tight junctions (Furuse et al., J. Cell Sci. 109:429-435, 1996; Chen et al., J. 5 Cell Biol. 138:891-899, 1997). It has been proposed that occludin promotes cell adhesion through homophilic interactions (an occludin on the surface of one cell binds to an identical occludin on the surface of another cell). A detailed discussion of occludin structure and function is provided by Lampugnani and Dejana, Curr. Opin Cell Biol. 9:674-682, 1997.

[0418] More recently, a second family of tight junction components has been identified. Claudins are transmembrane proteins that appear to be directly involved in cell adhesion and the formation of tight junctions (Furuse et al., J. Cell Biology 141:1539-1550, 1998; Morita et al., Proc. Natl. Acad. Sci. USA 96:511-516, 1999). Other previously described proteins that appear to be members of the claudin family include RVP-1 (Briehl and Miesfeld, Molecular Endocrinology 5:1381-1388, 1991; Katahira et al., J. Biological Chemistry 272:26652-26656, 1997), the Clostridium perfringens enterotoxin receptor (CPE-R; see Katahira et al., J. Cell Biology 136:1239-1247, 1997; Katahira et al., J. Biological Chemistry 272:26652-26656, 1997) and TMVCF (transmembrane protein deleted in Velo-cardio-facial syndrome; Sirotkin et al., Genomics 42:245-51, 1997).

[0419] Based on hydrophobicity analysis, all claudins appear to be approximately 22 kD and contain four hydrophobic domains that transverse the plasma membrane. It has been proposed that claudins promote cell adhesion through homophilic interactions (a claudin on the surface of one cell binds to an identical claudin on the surface of another cell) or heterophilic interactions, possibly with occludin.

[0420] Although cell adhesion is required for certain normal physiological functions, there are situations in which the level of cell adhesion is undesirable. For example, many pathologies (such as autoimmune diseases and inflammatory diseases) involve abnormal cellular adhesion. Cell adhesion may also play a role in graft rejection. In such circumstances, modulation of cell adhesion may be desirable.

[0421] In addition, permeability barriers arising from cell adhesion create difficulties for the delivery of drugs to specific tissues and tumors within the body. For example, skin patches are a convenient tool for administering drugs through the skin. However, the use of skin patches has been limited to small, hydrophobic molecules because of the epithelial and endothelial cell barriers. Similarly, endothelial cells render the blood capillaries largely impermeable to drugs, and the blood/brain barrier has hampered the targeting of drugs to the central nervous system. In addition, many solid tumors develop internal barriers that limit the delivery of anti-tumor drugs and antibodies to inner cells.

[0422] Attempts to facilitate the passage of drugs across such barriers generally rely on specific receptors or carrier proteins that transport molecules across barriers in vivo. However, such methods are often inefficient, due to low endogenous transport rates or to the poor functioning of a carrier protein with drugs. While improved efficiency has been achieved using a variety of chemical agents that disrupt cell adhesion, such agents are typically associated with undesirable side-effects, may require invasive procedures for administration and may result in irreversible effects.

[0423] Accordingly, there is a need in the art for compounds that modulate cell adhesion and improve drug delivery across permeability barriers without such disadvantages. The present invention fulfills this need and further provides other related advantages.

[0424] The present invention provides compounds and methods for modulating claudin-mediated cell adhesion and the formation of permeability barriers. Within certain aspects, the present invention provides cell adhesion modulating agents that inhibit or enhance claudin-mediated cell adhesion. Certain modulating agents comprise the claudin CAR sequence WKTSSTVG. Other modulating agents comprise at least five or seven consecutive amino acid residues of a claudin CAR sequence: Comprising the sequence TSSY, wherein each permutation is an individual specie of the present invention.

[0425] The present invention further provides for polypeptides comprising amino acid residues 32 to 35 of SEQ. ID NO: 698, wherein said sequence comprises an additional 1 to 31 consecutive residues of N-terminal sequence of SEQ. ID NO: 698 and an additional 1 to 193 consecutive C-terminal residues of SEQ. ID NO: 698. Further included are polypeptides comprising additional consecutive residues at both the N-terminal, C-terminal. Each permutation of the above polypeptides comprising additional N-terminal, C-terminal & N— and C terminal residues are included in the present invention as individual species.

[0426] The present invention further provides, within other aspects, polynucleotides encoding a modulating agent as provided above, expression vectors comprising such a polynucleotide, and host cells transformed or transfected with such an expression vector.

[0427] Within further aspects, the present invention provides modulating agents that comprise an antibody or antigen-binding fragment thereof that specifically binds to a claudin CAR sequence and modulates a claudin-mediated function.

[0428] The present invention further provides modulating agents comprising a mimetic of a claudin CAR sequence that comprises at least three or five consecutive amino acid residues of the claudin CAR sequence WKTSSYVG.

[0429] Within other aspects, modulating agents as described above may be linked to one or more of a drug, a detectable marker, a targeting agent and/or a support material. Alternatively, or in addition, modulating agents as described above may further comprise one or more of: (a) a cell adhesion recognition sequence that is bound by an adhesion molecule other than a claudin, wherein the cell adhesion recognition sequence is separated from any claudin CAR sequence(s) by a linker; and/or (b) an antibody or antigen-binding fragment thereof that specifically binds to a cell adhesion recognition sequence bound by an adhesion molecule other than a claudin. Such adhesion molecules may be selected from the group consisting of integrins, cadherins, occludin, N-CAM, JAM, PE-CAM, desmogleins, desmocollins, fibronectin, lammin and other extracellular matrix proteins.

[0430] Within other aspects, a modulating agent may comprise an antibody or antigen-binding fragment thereof that specifically binds to the claudin-50 CAR sequence WKTSSYVG.

[0431] The present invention further provides pharmaceutical compositions comprising a cell adhesion modulating agent as described above, in combination with a pharmaceutically acceptable carrier. Such compositions may further comprise a drug. In addition, or alternatively, such compositions may further comprise one or more of: (a) a peptide comprising a cell adhesion recognition sequence that is bound by an adhesion molecule other than a claudin; and/or (b) an antibody or antigen-binding fragment thereof that specifically binds to a cell adhesion recognition sequence bound by an adhesion molecule other than a claudin.

[0432] Within further aspects, methods are provided for modulating cell adhesion, comprising contacting a claudin-expressing cell with a cell adhesion modulating agent as described above.

[0433] Within one such aspect, the present invention provides methods for increasing vasopermeability in a mammal, comprising administering to a mammal a cell adhesion modulating agent as provided above, wherein the modulating agent inhibits claudin-mediated cell adhesion.

[0434] Within another aspect, methods are provided for reducing unwanted cellular adhesion in a mammal, comprising administering to a mammal a cell adhesion modulating agent as provided above, wherein the modulating agent inhibits claudin-mediated cell adhesion.

[0435] In yet another aspect, the present invention provides methods for enhancing the delivery of a drug through the skin of a mammal, comprising contacting epithelial cells of a mammal with a cell adhesion modulating agent as provided above and a drug, wherein the modulating agent inhibits claudin-mediated cell adhesion, and wherein the step of contacting is performed under conditions and for a time sufficient to allow passage of the drug across the epithelial cells.

[0436] The present invention further provides methods for enhancing the delivery of a drug to a tumor in a mammal, comprising administering to a mammal a cell adhesion modulating agent as provided above and a drug, wherein the modulating agent inhibits claudin-mediated cell adhesion.

[0437] Within further aspects, the present invention provides methods for treating cancer in a mammal, comprising administering to a mammal a cell adhesion modulating agent as provided above, wherein the modulating agent inhibits claudin-mediated cell adhesion.

[0438] The present invention further provides methods for inhibiting angiogenesis in a mammal, comprising administering to a mammal a cell adhesion modulating agent as provided above, wherein the modulating agent inhibits claudin mediated cell adhesion.

[0439] Within further aspects, the present invention provides methods for enhancing drug delivery to the central nervous system of a mammal, comprising administering to a mammal a cell adhesion modulating agent as provided above, wherein the modulating agent inhibits claudin-mediated cell adhesion.

[0440] The present invention further provides methods for enhancing wound healing in a mammal, comprising contacting a wound in a mammal with a cell adhesion modulating agent as provided above, wherein the modulating agent enhances claudin mediated cell adhesion.

[0441] Within a related aspect, the present invention provides methods for enhancing adhesion of foreign tissue implanted within a mammal, comprising contacting a site of implantation of foreign tissue in a mammal with a cell adhesion modulating agent as provided above, wherein the modulating agent enhances claudin mediated cell adhesion.

[0442] The present invention further provides methods for inducing apoptosis in a claudin-expressing cell, comprising contacting a claudin-expressing cell with a cell adhesion modulating agent as provided above, wherein the modulating agent inhibits claudin-mediated cell adhesion.

[0443] The present invention further provides methods for identifying an agent capable of modulating claudin-mediated cell adhesion. One such method comprises the steps of (a) culturing cells that express a claudin in the presence and absence of a candidate agent, under conditions and for a time sufficient to allow cell adhesion; and (b) visually evaluating the extent of cell adhesion among the cells.

[0444] Within another embodiment, such methods may comprise the steps of: (a) culturing normal rat kidney cells in the presence and absence of a candidate agent, under conditions and for a time sufficient to allow cell adhesion; and (b) comparing the level of cell surface claudin and E-cadherin for cells cultured in the presence of candidate agent to the level for cells cultured in the absence of candidate agent.

[0445] Within a further embodiment, such methods may comprise the steps of: (a) culturing human aortic endothelial cells in the presence and absence of a candidate agent, under conditions and for a time sufficient to allow cell adhesion; and (b) comparing the level of cell surface claudin and N-cadherin for cells cultured in the presence of candidate agent to the level for cells cultured in the absence of candidate agent.

[0446] Within yet another embodiment, such methods comprise the steps of: (a) contacting an antibody that binds to a modulating agent comprising a claudin CAR sequence with a test compound; and (b) detecting the level of antibody that binds to the test compound.

[0447] The present invention further provides methods for detecting the presence of claudin-expressing cells in a sample, comprising: (a) contacting a sample with an antibody that binds to a claudin comprising a claudin CAR sequence under conditions and for a time sufficient to allow formation of an antibody-claudin complex; and (b) detecting the level of antibody-claudin complex, and there from detecting the presence of claudin-expressing cells in the sample.

[0448] Within further aspects, the present invention provides kits for detecting the presence of claudin-expressing cells in a sample, comprising: (a) an antibody that binds to a modulating agent comprising a claudin CAR sequence; and (b) a detection reagent.

[0449] The present invention further provides, within other aspects, kits for enhancing transdermal drug delivery, comprising: (a) a skin patch; and (b) a cell adhesion modulating agent, wherein the modulating agent comprises a claudin CAR sequence, and wherein the modulating agent inhibits claudin-mediated cell adhesion.

[0450] A detailed description of the above methods are described in PCT application WO 00/26360 (Blaschuck, O. W., et al.), incorporated herein in its entirety.

[0451] Further included in the present invention are methods of treating Clostridium perfringens or Clostridium difficile or Clostridium botulinum infections by targeting the enterotoxin, preferably Clostridium perfringens enterotoxin. Clostridium enterotoxin (CE) binds to Claudin-50. Purified Claudin-50 polypeptides can be used to absorb CE to prevent CE's cytotoxic effects on cells. Preferred CE binding Claudin-50 polypeptides include the full length and mature Claudin-50 polypeptide and fragments comprising the extracellular domains, amino acid residues 29 to 81 and 103 to 116. Further preferred CE binding Claudin-50 polypeptides include the extracellular domain 29 to 81 and fragments comprising the CAR sequence. CE binding Claudin-50 polypeptides may further be recombinantly fused or chemically coupled (covalently or non-covalently) to a heterologous polypeptide, molecule, or support. Means of administering CE binding Claudin-50 polypeptide compositions are those well known for administering biologically active polypeptides. Preferably, CE binding Claudin-50 polypeptide compositions are administered in at least equamolar concentration compared with CE. More preferably, CE binding Claudin-50 polypeptide compositions are administered in at least a 10 to 100 fold molar excess concentration compared with CE.

[0452] The above CE binding Claudin-50 polypeptides are also useful for affinity purification CE. For example, CE binding Claudin-50 polypeptides can be fixed or coupled to a solid support in a column and used to bind CE in a biological sample. CE can be released from the column for example, by using a salt gradient.

[0453] CE binding Claudin-50 polypeptide compositions are also useful in detecting and diagnosing Clostridium perfringens infection. The presence of CE indicates Clostridium perfringens infection. The level of CE is proportional to the level or degree of the disease or infection. Moreover, the degree of cellular disruption at tight junctions is also proportional to the level of CE. CE binding Claudin-50 polypeptides will preferentially bind endogenous claudins at the sites of tight junction disruptions. CE binding Claudin-50 polypeptides can therefore be used to detect or diagnose Clostridium perfringens infection by either binding CE or by binding sites of tight junction disruption. Biological samples including fluids and tissue samples can be assayed using methods well known in the art. Clostridium perfringens infections can further be localized in vivo using CE binding Claudin-50 polypeptides in in vivo imaging.

[0454] Protein of SEQ ID NO: 703

[0455] The protein of SEQ ID NO: 703 encoded by the extended cDNA SEQ ID NO: 61 and expressed in lymphocytes exhibits an extensive homology to a stretch of 91 amino acid of a human secreted protein expressed in peripheral blood mononucleocytes (Genpep accession number W36955 and Genseq accession number V00433). The amino acid residues are identical except for the substitution of asparagine to isoleucine at positions 94, and the conservative substitutions at positions 108, 109 and 110 of the 110 amino acids long matched protein.

[0456] Protein of SEQ ID NO: 704

[0457] The protein of SEQ ID NO: 704 encoded by the extended cDNA SEQ ID NO: 62 exhibits extensive homologies to stretches of proteins encoding vacuolar proton-ATPase subunits 9.2 of either human (Genbank accession number Y15286) or bovine species (Genbank accession umber Y15285). These two highly conserved proteins are extremely hydrophobic membrane roteins with two membrane-spanning helices and a potential metal-binding domain conserved in mammalian protein homologues (Ludwig et al., J. Biol. Chem., 273:10939-10947 (1998)). The amino acid residues are completely identical, the protein of SEQ ID NO: 704 is missing amino acids 1 to 92 from the Genbank sequences. The protein of SEQ ID NO: 704 contains the second putative transmembrane domain as well as the potential metal-binding site.

[0458] Taken together, these data suggest that the protein of SEQ ID NO: 704 may play a role in energy conservation, secondary active transport, acidification of intracellular compartments and/or cellular pH homeostasis. Preferred fragments of SEQ ID NO: 704 and the corresponding mature polypeptide encoded by the human cDNA of the deposited clone are those with inositol ATPase activity. Further preferred are fragments with not less then 100 fold less activity, not less than 10 fold activity, and not less than 5 fold activity when compared to mature protein.

[0459] Protein of SEQ ID NO: 705

[0460] The protein of SEQ ID NO: 705 encoded by the extended cDNA SEQ ID NO: 63 shows homology to short stretches of Drosophila, C. elegans and chloroplast proteins similar to E. coli ribosomal protein L16.

[0461] Taken together, these data suggest that the protein of SEQ ID NO: 705 may be a ribosomal protein.

[0462] Protein of SEQ ID NO: 706

[0463] The protein of SEQ ID NO: 706, encoded by the cDNA of SEQ ID NO:64, is a chemokine. The protein can be used to attract and activate monocytes and lymphocytes, especially to a site of infection or tumor. The protein can also be used in in vivo imaging to identify/locate/diagnose sites of infection or tumors. Preferred fragments of SEQ ID NO: 706 and the corresponding mature polypeptide encoded by the human cDNA of the deposited clone are those with the above activities. Further preferred are fragments with not less then 100 fold less activity, not less than 10 fold activity, and not less than 5 fold activity when compared to mature protein.

[0464] Protein of SEQ ID NO: 709

[0465] The protein of SEQ ID NO: 709, encoded by the extended cDNA SEQ ID NO: 67, is human Connexin 31.1. Connexins are a family of integral membrane proteins that oligomerize into clusters of intercellular channels called gap junctions, which join cells in virtually all metazoans. These channels permit exchange of ions between neurons and between neurons and excitable cells such as myocardiocytes (for review, see Goodenough et al., Ann. Rev. Biochem., 65:475-502 (1996)).

[0466] Human connexin 31.1 is expressed only in the skin, with Connexin 31.1 mRNA being 15-30 times more abundant in mature skin than in fetal skin. Within the skin layers, human Connexin 31.1 expression is localized to the keratinocyte layer. Human Connexin 31.1. is therefore useful as a marker for skin, particularly the keratinocyte layer, as well as keratinocytes, using either human Connexin 31.1 polynucleotides or antibodies made to human Connexin 31.1 polypeptides. Moreover, human Connexin 31.1 is useful as a marker for skin tumors because, whereas hyperplasia express Connexin 31.1, skin tumors at all stages do not. Hence, Connexin 31.1 polynucleotides and polupeptides are useful for differentiating between a skin hyperplasia and a tumor.

[0467] Human Connexin 31.1 is also useful in the methods for treating cancer, perferrably skin tumors, more preferably skin tumors involving keratinocytes. Preferred methods of using Human Connexin 31.1 for treating cancer includes the methods described in PCT application WO 97/28179 (Fick, J. R. et al.) incorporated herein in its entirety. Preferred fragments of SEQ ID NO: 709 and the corresponding mature polypeptide encoded by the human cDNA of the deposited clone are those with useful in the above methods, e.g., antigenic fragments and those fragments which form gap junctions.

[0468] Protein of SEQ ID NO: 710

[0469] The protein of SEQ ID NO: 710 encoded by the extended cDNA SEQ ID NO: 68 shows homologies with different DNA or RNA binding proteins such as the human Staf50 transcription factor (Genbank accession number X82200), the human Ro/SS-A ribonucleoprotein autoantigen (Swissprot accession number P19474) or the murine RPT1 transcription factor (Swissprot accession number P15533). The protein of SEQ ID NO: 710 exhibits a putative signal peptide and also a PROSITE signature for a RING type zinc finger domain located from positions 15 to 59. Secreted proteins may have nucleic acid binding domain as shown by a nematode protein thought to regulate gene expression which exhibits zinc fingers as well as a functional signal peptide (Holst and Zipfel, J. Biol. Chem., 271:16275-16733 (1996)).

[0470] Taken together, these data suggest that the protein of SEQ ID NO: 710 may play a role in protein-protein interaction in intracellular signaling and eventually may directly or indirectly bind to DNA and/or RNA, hence regulating gene expression.

[0471] Protein of SEQ ID NO: 712

[0472] The protein of SEQ ID NO: 712 encoded by the extended cDNA SEQ ID NO: 70 exhibits extensive homologies to proteins encoding RING zinc finger proteins of the human, chicken and rodent species, as well as an EGF-like domain. Two stretches of 341 and of 13 amino acids of the human RING zinc finger protein which might bind DNA (Genbank accession number AF037204). The amino acid residues are identical except for conservative substitutions at positions 18, 29, 156 and 282 of the 381 amino acid long human RING zinc finger. Such RING zinc finger proteins are thought to be involved in protein-protein interaction and are especially found in nucleic acid binding proteins. Secreted proteins may have nucleic acid binding domain as shown by a nematode protein thought to regulate gene expression which exhibits zinc fingers as well as a functional signal peptide (Holst and Zipfel, J. Biol. Chem., 271:16275-16733 (1996)).

[0473] Taken together, these data suggest that the protein of SEQ ID NO: 712 may play a role in protein-protein interaction or be a nucleic acid binding protein.

[0474] Proteins of SEQ ID NOs: 713 and 739

[0475] The proteins of SEQ ID NOs: 713 and 739 encoded by the extended cDNA SEQ ID NOs: 70 and 96, respectively, belong to the stomatin or band 7 family. The human stomatin is an integral membrane phosphoprotein thought to be involved to regulate the cation conductance by interacting with other proteins of the junctional complex of the membrane skeleton (Gallagher and Forget, J. Biol. Chem., 270:26358-26363 (1995)). The proteins of SEQ ID NOs: 713 and 739 exhibit the PROSITE signature typical for the band 7 family signature.

[0476] The proteins of SEQ ID NOs: 713 and 739 play a role in the regulation of ion transport, hence in the control of cellular volume. These proteins are useful in diagnosing and/or treating stomatocytosis and/or cryohydrocytosis by detecting a decreased level or absence of the proteins or alternatively by detecting a mutation or deletion affecting tertiary structure of the proteins.

[0477] Protein of SEQ ID NO: 725 and 740

[0478] The proteins of SEQ ID NO: 213 and 229, encoded by the cDNA of SEQ ID NO: 83 and 98, respectively, is human Glia Maturation Factor-gamma 2 (GMF-gamma 2). SEQ ID NO: 740 differs from SEQ ID NO: 725 in that SEQ ID NO: 740 has additional amino acids at the N-terminus. The following description applies equally to both SEQ ID NO: 725 and 740. A preferred use of GMF-gamma 2 is to stimulate neurite outgrowth or neurite re-sprouting. These methods include both in vitro and in vivo uses, but preferred uses are those for treating neural injuries and cancer as disclosed in WO9739133 and WO9632959, incorporated herein in their entireties.

[0479] GMF-gamma 2 may also be used as a neurotrophic and as a neuroprotective agent against toxic insults, such as ethonal and other neurotoxic agents. GMF-gamma2 may be used as a neurotrophic or neuroprotective agent either in vitro or in vivo. A preferred target of GMF-gamma 2 as a neurotrophic or neuroprotective agent are primary neurons.

[0480] GMF-gamma 2 may further be used to stimulate the expression and secretion of NGF and BDNF in glial cells both in vitro and in vivo. Conditioned media from cells treated with GMF-gamma 2 is useful as a source of NGF and BDNF. GMF-gamma 2 may further be used to target cells directly or by recombinantly fusing GMF-gamma 2 to a heterologous protein, such as a ligand or antibody specific to the target cell (e.g., glial cells). Alternatively, GMF-gamma 2 may be fused or covalently or non-covalently coupled to a heterologous protein or other biological or non-biological molecule wherein the heterologous protein or molecule is used as this targeting reagent.

[0481] Preferred fragments of SEQ ID NOs: 725 and 740 and the corresponding polypeptide encoded by the human cDNAs of the deposited clones are those with the above activities. Further preferred are fragments with not less then 100 fold less activity, not less than 10 fold activity, and not less than 5 fold activity when compared to the protein of SEQ ID NO: 740 or the protein encoded by the corresponding human cDNA of the deposited clone.

[0482] Protein of SEQ ID NO: 726:

[0483] The protein of SEQ ID NO: 726 encoded by the extended cDNA SEQ ID NO: 84 isolated from brain shows extensive homology to a human SH3 binding domain glutamic acid-rich like protein or SH3BGRL (Egeo et al, Biochem. Biophys. Res. Commun., 247:302-306 (1998)) with Genbank accession number is AF042081. The amino acid residues are identical to SH3BGRL except for positions 63 and 101 in the 114 amino acid long matched sequence. This SH3BRGL protein is itself homologous to the middle proline-rich region of a protein containing an SH3 binding domain, the SH3BGR protein (Scartezzini et al., Hum. Genet., 99:387-392 (1997)). This proline-rich region is also highly conserved in mice. Both SH3BGR and SH3BGRL proteins are thought to be involved in the Down syndrome pathogenesis. The protein SEQ ID NO: 726 also contains the proline-rich SH3 binding domain (bold) and a potential RGD cell attachment sequence (underlined).

[0484] SH3 domains are small important functional modules found in several proteins from all eukaryotic organisms that are involved in a whole range of regulation of protein-protein interaction, e.g. in regulating enzymatic activities, recruiting specific substrates to the enzyme in signal transduction pathways, in interacting with viral proteins and they are also thought to play a role in determining the localization of proteins to the plasma membrane or the cytoskeleton (for a review, see Cohen et al, Cell, 80:237-248 (1995)).

[0485] The Arg-Gly-Asp (RGD) attachment site promote cell adhesion of a large number of adhesive extracellular matrix, blood and cell surface proteins to their integrin receptors which have been shown to regulate cell migration, growth, differentiation and apoptosis. This cell adhesion activity is also maintained in short RGD containing synthetic peptides which were shown to exhibit anti-thrombolytic and anti-metastatic activities and to inhibit bone degradation in vivo (for review, see Ruoslahti, Annu. Rev. Cell Dev. Biol., 12:697-715 (1996)).

[0486] Taken together, these data suggest that the protein of SEQ ID NO: 726 may be important in regulating protein-protein interaction in signal transduction pathways, and/or may play a role of localization of proteins to the plasma membrane or cytoskeleton, and/or may play a role in cell adhesion. Moreover, this protein or part therein, especially peptides containing the RGD motif, may be useful in diagnosing and treating cancer, thrombosis, osteoporosis and/or in diagnosing and treating disorders associated with the Down syndrome.

[0487] Protein of SEQ ID NO: 728

[0488] The protein of SEQ ID NO: 728 found in testis encoded by the extended cDNA SEQ ID NO: 86 shows homologies to protein domains with a 4-disulfide core signature found in either an extracellular proteinase inhibitor named chelonianin (Swissprot accession number P00993) or in rabbit and human proteins specifically expressed in epididymes (Genbank accession numbers U26725 and R13329). The matched domain in red sea turtle chelonianin is known to inhibit subtilisin, a serine protease (Kato and Tominaga, Fed. Proc., 38:832 (1979)). All cysteines of the 4 disulfide core signature thought to be crucial for biological activity are present in the protein of SEQ ID NO: 728. The 4 disulfide core signature is present except for a conservative substitution of asparagine to glutamine.

[0489] Taken together, these data suggest that the protein of SEQ ID NO: 728 may play a role in protein-protein interaction, act as a protease inhibitor and/or may also be related to male fertility.

[0490] Protein of SEQ ID NO: 735

[0491] The protein of SEQ ID NO: 735 encoded by the extended cDNA SEQ ID NO: 93 shows homology to short stretches of a human protein called Tspan-1 (Genbank accession number AF054838) which belongs to the 4 transmembrane superfamily of molecular facilitators called tetraspanin (Meakers et al., FASEB J., 11:428-442 (1997)).

[0492] Taken together, these data suggest that the protein of SEQ ID NO: 735 may play a role in cell activation and proliferation, and/or adhesion and motility and/or differentiation and cancer.

[0493] Protein of SEQ ID NO: 532

[0494] The protein of SEQ ID NO: 532 encoded by the extended cDNA SEQ ID NO: 175 isolated from lymphocyte shows complete identity to a human protein TFAR19 that may play a role in apoptosis (Genbank accession number AF014955) as shown by the alignment in FIG. 10.

[0495] Taken together, these data suggest that the protein of SEQ ID NO: 532 may be involved in the control of development and homeostasis. Thus, this protein may be useful in diagnosis and/or treating several types of disorders including, but not limited to, cancer, autoimmune disorders, viral infections such as AIDS, neurodegenerative disorders, osteoporosis.

[0496] Proteins of SEQ ID NOs: 489, 490 and 547

[0497] The proteins of SEQ ID NOs: 174, 175 and 232 encoded by the extended cDNAs SEQ ID NOs:. 132, 133 and 190 respectively and isolated from lymphocytes shows complete extensive homologies to a human secreted protein (Genseq accession number W36955). As shown by the alignments of FIG. 11, the amino acid residues are identical to those of the 110 amino acid long matched protein except for positions 51 and 108-110 of the matched protein for the protein of SEQ ID NOs: 489, for positions 48, 94 and 108-110 of the matched protein of SEQ ID NOs:490 and for positions 94, and 108-110 of the matched protein for the protein of SEQ ID NOs: 547. Proteins of SEQ ID NOs: 489 and 547 may represent alternative forms issued from alternative use of polyadenylation signals.

[0498] Taken together, these data suggest that the proteins of SEQ ID NOs: 489, 490 and 547 may play a role in cell proliferation and/or differentiation, in immune responses and/or in haematopoeisis. Thus, this protein or part therein, may be useful in diagnosing and treating several disorders including, but not limited to, cancer, immunological, haematological and/or inflammatory disorders. It may also be useful in modulating the immune and inflammatory responses to infectious agents and/or to suppress graft rejection.

[0499] Proteins of SEQ ID NO: 546

[0500] The protein of SEQ ID NO: 546 encoded by the extended cDNA SEQ ID NO: 189 shows extensive homology with the human E25 protein (Genbank accession number AF038953). As shown by the alignments in FIG. 12, the amino acid residues are identical except for position 159 in the 263 amino acid long matched sequence. The matched protein might be involved in the development and differentiation of haematopoietic stem/progenitor cells. In addition, it is the human homologue of a murine protein thought to be involved in chondro-osteogenic differentiation and belonging to a novel multigene family of integral membrane proteins (Deleersnijder et al, J. Biol. Chem., 271: 19475-19482 (1996)).

[0501] The protein of invention contains two short segments from positions 1 to 21 and from 100 to 120 as predicted by the software TopPred II (Claros and von Heijne, CABIOS applic. Notes, 10: 685-686 (1994)). The first transmembrane domains matches exactly those predicted for the murine E25 protein.

[0502] Taken together, these data suggest that the protein of SEQ ID NO: 546 may be involved in cellular proliferation and differentiation. Thus, this protein may be useful in diagnosing and/or treating several types of disorders including, but not limited to, cancer and embryogenesis disorders.

[0503] Protein of SEQ ID NO: 511

[0504] The protein of SEQ ID NO: 511 encoded by the extended cDNA SEQ ID NO: 154 shows extensive homology with the human seventransmembrane protein (Genbank accession number Y11395) and its murine homologue (Genbank accession number Y11550). As shown by the alignments in FIG. 13, the amino acid residues are identical except for position 174 in the 399 amino acid long human matched sequence. The matched protein potentially associated to stomatin may act as a G-protein coupled receptor and is likely to be important for the signal transduction in neurons and haematopoietic cells (Mayer et al, Biochem. Biophys. Acta., 1395: 301-308 (1998)).

[0505] Taken together, these data suggest that the protein of SEQ ID NOs: 511 may be involved in signal transduction. Thus, this protein may be useful in diagnosing and/or treating several types of disorders including, but not limited to, cancer, neurodegenerative diseases cardiovascular disorders, hypertension, renal injury and repair and septic shock.

[0506] Protein of SEQ ID NO: 473

[0507] The protein of SEQ ID NOs: 473 encoded by the extended cDNA SEQ ID NO: 116 shows homology with the murine subunit 7a of the COP9 complex (Genbank accession number AF071316). As shown by the alignments in FIG. 14, the amino acid residues are identical except for positions 90, 172 and 247 in the 275 amino acid long matched sequence. This complex is highly conserved between mammals and higher plants where it has been shown to act as a repressor of photomorphogenesis All the components of the mammalian COP9 complex contain structural features also present in components of the proteasome regulatory complex and the translation initiation complex eIF3 complex, suggesting that the mammalian COP9 complex is an important cellular regulator modulating multiple signaling pathways (Wei et al, Curr. Biol., 8 919-922 (1998)).

[0508] Taken together, these data suggest that the protein of SEQ ID NO: 473 may be involved in cellular signaling, probably as a subunit of the human COP9 complex. Thus, this protein may be useful in diagnosing and/or treating several types of disorders including, but not limited to, cancer, neurodegenerative diseases, cardiovascular disorders, hypertension, renal injury and repair and septic shock.

[0509] Protein of SEQ ID NO: 541

[0510] The protein of SEQ ID NO:541 encoded by the extended cDNA SEQ ID NO: 184 shows homology with the bovine subunit B14.5B of the NADH-ubiquinone oxidureductase complex (Arizmendi et al, FEBS Lett., 313: 80-84 (1992) and Swissprot accession-number Q02827, SEQ ID NO: 514). As shown by the alignments in FIG. 15, the amino acid residues are identical except for positions 3-4,6-12, 32-34, 47, 53-55, 67 and 69-74 in the 120 amino acid long matched sequence. This complex is the first of four complexes located in the inner mitochondrial membrane and composing the mitochondrial electron transport chain. Complex I is involved in the dehydrogenation of NADH and the transportation of electrons to coenzyme Q. It is composed of 7 subunits encoded by the mitochondrial genome and 34 subunits encoded by the nuclear genome. It is also thought to play a role in the regulation of apoptosis and necrosis. Mitochondriocytopathies due to complex I deficiency are frequently encountered and affect tissues with a high energy demand such as brain (mental retardation, convulsions, movement disorders), heart (cardiomyopathy, conduction disorders), kidney (Fanconi syndrome), skeletal muscle (exercise intolerance, muscle weakness, hypotonia) and/or eye (opthmaloplegia, ptosis, cataract and retinopathy). For a review on complex I see Smeitink et al., Hum. Mol. Gent., 7: 1573-1579 (1998).

[0511] Taken together, these data suggest that the protein of SEQ ID NO:541 may be part of the mitochondrial energy-generating system, probably as a subunit of the NADH-ubiquinone oxidoreductase complex. Thus, this protein or part therein, may be useful in diagnosing and/or treating several disorders including, but not limited to, brain disorders (mental retardation, convulsions, movement disorders), ‘heart disorders (cardiomyopathy, conduction disorders), kidney disorders (Fanconi syndrome), skeletal muscle disorders (exercise intolerance, muscle weakness, hypotonia) and/or eye disorders opthmalmoplegia, ptosis, cataract and retinopathy).

[0512] Proteins of SEQ ID NOs: 464, 465 and 526

[0513] The proteins of SEQ ID NOs: 464, 465 and 526 encoded by the extended cDNAs SEQ ID NOs: 107, 108 and 169 respectively and found in, skeletal muscle shows homologies with T1/ST2 ligand polypeptide of either human (Genbank accession number U41804 and Genseq accession number WO9639) or rodent species (Genbank accession number U41805 and Genseq accession number WO9640). These polypeptides are thought to be cytokines that bind to the ST2 receptor, a member of the immunoglobulin family homologous to the interleukin-1 receptor and present on some lymphoma cells. They are predicted to be cell-surface proteins containing a short transmembrane domain. (Gayle et al, J. Biol. Chem., 271: 5784-5789 (1996)). Proteins of SEQ ID NOs: 464, 465 and 526 may represent alternative forms issued from alternative use of polyadenylation signals.

[0514] The protein of invention contains two short transmembrane segments from positions 5 to 25 and from 195 to 215 as predicted by the software TopPred II (Claros and von Heijne, CABIOS applic. Notes, 10:685-686 (1994)). The second transmembrane domain matches exactly those of the matched cell-surface protein.

[0515] Taken together, these data suggest that the protein of SEQ ID NOs: 464, 465 and 526 may act as a cytokine, thus may play a role in the regulation of cell growth and differentiation and/or in the regulation of the immune response. Thus, this protein or part therein, may be useful in diagnosing and treating several disorders including, but not limited to, cancer, immunological, haematological and/or inflammatory disorders. It may also be useful in modulating the immune and inflammatory responses to infectious agents such as HIV and/or to suppress graft rejection.

[0516] Protein of SEQ ID NO: 492

[0517] The protein SEQ ID NO: 492 found in testis encoded by the extended cDNA SEQ ID NO: 135 shows homologies to serine protease inhibitor proteins belonging to the pancreatic trypsin inhibitor family (Kunitz) such as the extracellular proteinase inhibitor named chelonianin (Swissprot accession number P00993). The characteristic PROSITE signature of this family is conserved in the protein of the invention (positions 69 to 87) except for a drastic change of the last cysteine residue into an arginine residue.

[0518] Taken together, these data suggest that the protein of SEQ ID NO: 492 may be a protease inhibitor, probably of the Kunitz family. Thus, this protein or part therein, may be useful in diagnosing and treating several disorders including but not limited to, cancer and neurodegenerative disorders such as Alzheimer's disease.

[0519] Protein of SEQ ID NO: 461

[0520] The protein SEQ ID NO: 461 encoded by the extended cDNA SEQ ID NO: 104 shows homology to human apolipoprotein L (Genbank accession number AF019225). The matched protein is a secreted high density lipoprotein associated with apoA-1-containing lipoproteins which play a key role in reverse cholesterol transport.

[0521] Taken together, these data suggest that the protein of SEQ ID NO. 461 may play a role in lipid metabolism. Thus, this protein may be useful in diagnosing and/or treating several types of disorders including, but not limited to, hyperlipidemia, hypercholesterolemia, atherosclerosis, cardiovascular disorders such as, coronary heart disease, and neurodegenerative disorders such as Alzheimer's disease or dementia.

[0522] Protein of SEQ ID NO: 478

[0523] The protein SEQ ID NO: 478 encoded by the extended cDNA SEQ ID NO: 121 shows homology to the yeast autophagocytosis protein AUT1 (SwissProt accession number P40344). The matched protein is required for starvation-induced non-specific bulk transport of cytoplasmic proteins to the vacuole.

[0524] Taken together, these data suggest that the protein of SEQ ID NO: 478 may play a role in protein transport. Thus, this protein may be useful in diagnosing and/or treating several types of disorders including, but not limited to, autoimmune disorders and immune disorders due to dysfunction of antigen presentation.

[0525] Protein of SEQ ID NO: 529

[0526] The protein of SEQ ID NO: 529 encoded by the extended cDNA SEQ ID NO: 172 and expressed in adult brain shows extensive homology to part of the murine SHYC protein (Genbank accession number AF072697) which is expressed in the developing and embryonic nervous system as well as along the olfactory pathway in adult brains (Koster et al., Neuroscience Letters., 252: 69-71 (1998)).

[0527] Taken together, these data suggest that the protein of SEQ ID NO: 529 may play a role in nervous system development and function. Thus, this protein may be useful in diagnosing and/or treating cancer and/or brain disorders, including neurodegenerative disorders such as Alzheimer's and Parkinson's diseases.

[0528] Protein of SEQ ID NO: 540

[0529] The protein of SEQ ID NO: 540 encoded by the extended cDNA SEQ ID NO: 183 and expressed in adult prostate belong to the phosphatidylethanolainin-binding protein from which it exhibits the characteristic PROSITE signature from positions 90 to 112 (see table VIII). Proteins from this widespread family, from nematodes to fly, yeast, rodent and primate species, bind hydrophobic ligands such as phospholipids and nucleotides. They are mostly expressed in brain and in testis and are thought to play a role in cell growth and/or maturation, in regulation of the sperm maturation, motility and ‘in membrane remodeling. They may act either through signal transduction or through oxidoreduction reactions (for a review see Schoentgen and Jollès, FEBS Letters, 369: 22-26 (1995)).

[0530] Taken together, these data suggest that the protein of SEQ ID NO: 540 may play a role in cell. Thus, these growth, maturation and in membrane remodeling and/or may be related to male fertility. Thus, this protein may be useful in diagnosing and/or treating cancer, neurodegenerative diseases, and/of, disorders related to male fertility and sterility.

[0531] Protein of SEQ ID NO: 468

[0532] The protein of SEQ ID NO: 468 encoded by the extended cDNA SEQ ID NO. 111 and expressed in brain exhibits homology to different integral membrane proteins. These membrane proteins include the nematode protein SRE-2 (Swissprot accession number Q09273) that belongs to the multigene SRE family of C. elegans receptor-like proteins and a family of tricarboxylate carriers conserved between flies and mammals. One member of this matched family is the rat tricarboxylate carrier (Genbank accession number S70011), an anion transporter localized in the inner membrane of mitochondria and involved in the biosynthesis of fatty acids and cholesterol. The protein of the invention contains a short transmembrane segments from positions 5 to 25 as predicted by the software TopPred II (Claros and von Heijne, CABIOS applic. Notes, 10:685-686 (1994)).

[0533] Taken together, these data suggest that the protein of SEQ ID NO: 468 may play a role in signal transduction and/or in molecule transport. Thus, this protein may be useful in diagnosing and/or treating several types of disorders including, but not limited to, cancer, neurodegenerative diseases, immune disorders, cardiovascular disorders, hypertension, renal injury and repair and septic shock.

[0534] Protein of SEQ ID NO: 528

[0535] The protein of SEQ ID NO: 528 encoded by the extended cDNA SEQ ID NO: 171 and expressed in brain exhibits homology with part of the tRNA pseudouridine 55 synthase found in Escherichia Coli (Swissprot accession number P09171). This bacterial protein belongs to the NAP57/CBF5/TRUB family of nuclieolar proteins found in bacteria, yeasts and mammals involved in rRNA or tRNA biosynthesis, ribosomal subunit assembly and/or centromere/mircotubule binding.

[0536] Taken together, these data suggest that the protein of SEQ ID NO:528 may play a role in rRNA or tRNA biogensis and function. Thus, this protein may be useful in diagnosing and/or treating several types of disorders including, but not limited to, cancer, hearing loss or disorders linked to chromosomal instability such as dyskeratosis.

[0537] Protein of SEQ ID NO: 555

[0538] The protein of SEQ ID NO: 555 encoded by the extended cDNA SEQ ID NO: 198 and expressed in brain exhibits homology with a family of eukaryotic cell surface antigens containing 4 transmembrane domains. The PROSITE signature for this family is conserved in the protein of the invention except for a substitution of an alanine residue in place of any of the following hydrophic residues: leucine, valine, isoleucine or methionine (positions 21 to 36).

[0539] The protein of the invention contains three short transmembrane segments from positions 6 to 26, 32 to 52 and from 56 to 76 as predicted by the software TopPred II (Claros and von Heijne, CABIOS applic. Notes, 10: 685-686 (1994)). These transmembrane domains match the last three transmembrane domains of the matched protein family.

[0540] Taken together, these data suggest that the protein of SEQ ID NO: 555 may play a role in immunological and/or inflammatory responses, probably as a cell surface antigen. Thus, this protein or part therein, may be useful in diagnosing and treating several disorders including, but not limited to, cancer, immunological, haematological and/or inflammatory disorders. It may also be useful in modulating the immune and inflammatory responses to infectious agents and/or to suppress graft rejection.

[0541] Protein of SEQ ID NO: 554

[0542] The protein of SEQ ID NO: 554 encoded by the extended cDNA SEQ ID NO: 197 exhibits homology with a conserved region in a family of NA+/H+ exchanger conserved in yeast, nematode and mammals. These cation/proton exchangers are integral membrane proteins with 5 transmembrane segments involved in intracellular pH regulation, maintenance of cell volume, reabsorption of sodium across specialized epithelia, vectorial transport and are also thought to play a role in signal transduction and especially in the induction of cell proliferation and in the induction of apoptosis.

[0543] The protein of invention contains four short transmembrane segments from positions 21 to 41, 48 to 68 and from 131 to 151 as predicted by the software TopPred II (Claros and von Heijne, CABIOS applic. Notes, 10: 685-686 (1994)). The third and fourth transmembrane domains match the fourth and fifth transmembrane segments of the matched family of proteins.

[0544] Taken together, these data suggest that the protein of SEQ ID NO: 554 may play a role in membrane permeability and/or in signal transduction. Thus, this protein may be useful in diagnosing and/or treating several types of disorders including, but not limited to, cancer, neurodegenerative diseases, cardiovascular disorders, hypertension, renal injury and repair, septic shock as well as disorders of membrane permeability such as diarrhea.

[0545] Protein of SEQ ID NO: 515

[0546] The protein of SEQ ID NO:515 encoded by the extended cDNA SEQ ID NO: 158 and expressed in brain exhibits extensive homology to the N-terminus of cell division cycle protein 23 (Genbank accession number AF053977) and also to a lesser extent to its homologue in Saccharomyces cerevisiae. The matched protein is required for chromosome segregation and is part of the anaphae-promoting complex necessary for cell cycle progression to mitosis.

[0547] Taken together, these data suggest that the protein of SEQ ID NO: 515 may play a role in cellular mitosis. Thus, this protein may be useful in diagnosing and/or treating several types of disorders including, but not limited to, cancer and leukemia.

[0548] Protein of SEQ ID NO: 545

[0549] The protein of SEQ ID NO: 545 encoded by the extended cDNA SEQ ID NO: 188 exhibits extensive homology to the C-terminus of the eta subunit of T-complex polypeptide 1 conserved from yeasts to mammals, and even complete identity with the last 54 amino acid residues of the human protein (Genbank accession number AF026292). The matched protein is a chaperonin which assists the folding of actins and tubulins in eukaryotic cells upon ATP hydrolysis.

[0550] Taken together, these data suggest that the protein of SEQ ID NO:545 may play a role in the folding, transport, assembly and degradation of proteins. Thus, this protein may be useful in diagnosing and/or treating several types of disorders including, but not limited to, cancer, cardiovascular disorders, immune disorders, neurodegenerative disorders, osteoporosis and arthritis.

[0551] Protein of SEQ ID NO: 482

[0552] The protein of SEQ ID NO: 482 encoded by the extended cDNA SEQ ID NO: 125 exhibits homology to a monkey pepsinogen A-4 precursor (Swissprot accession number P27678) and to related members of the aspartyl protease family. The matched protein belongs to a family of widely distributed proteolytic enzymes known to exist in vertebrate, fungi, plants, retroviruses and some plant viruses.

[0553] Taken together, these data suggest that the protein of SEQ ID NO: 482 may play a role in the degradation of proteins. Thus, this protein may be useful in diagnosing and/or treating several types of disorders including, but not limited to, cancer, autoimmune disorders and immune disorders due to dysfunction of antigen presentation.

[0554] Protein of SEQ ID NO: 494

[0555] The protein of SEQ ID NO: 494 encoded by the extended cDNA SEQ ID NO: 137 found in testis exhibits homology to part of mammalian colipase precursors. Colipases are secreted cofactors for pancreatic lipases that allow the lipase to anchor at the water-lipid interface. Colipase plays a crucial role in the intestinal digestion and absorption of dietary fats. The 5 cysteines characteristic for this protein family are conserved in the protein of the invention although the colipase PROSITE signature is not.

[0556] Taken together, these data suggest that the protein of SEQ ID NO: 494 may play a role in the lipid metabolism and/or in male fertility. Thus, this protein may be useful in diagnosing and/or treating several types of disorders including, but not limited to, hyperlipidemia, hypercholesterolemia, atherosclerosis, cardiovascular disorders such as coronary heart disease, and neurodegenerative disorders such as Alzheimer's disease or dementia, and disorders linked to male fertility.

[0557] Protein of SEQ ID NO: 542

[0558] The protein of SEQ ID NO: 542 encoded by the extended cDNA SEQ ID NO: 185 exhibits extensive homology to the ATP binding region of a whole family of serine/threonine protein kinases belonging to the CDC2/CDC28 subfamily. The PROSITE signature characteristic for this domain is present in the protein of the invention from positions 10 to 34.

[0559] Taken together, these data suggest that the protein of SEQ ID NO: 542 may bind ATP, and even be a protein kinase. Thus, this protein may be useful in diagnosing and/or treating several types of disorders including, but not limited to, cancer, neurodegenerative diseases, cardiovascular disorders, hypertension, renal injury and repair and septic shock.

[0560] Protein of SEQ ID NO: 776 (Internal Designation 26-44-1-B5-CL31)

[0561] The protein of SEQ ID NO: 776 encoded by the extended cDNA SEQ ID NO: 371 isolated from ovary shows extensive homology to a human protein called phospholemman or PLM and its homologues in rodent and canine species. PLM is encoded by the nucleic acid sequence of Genbank accession number U72245. Phospholemman is a prominent plasma membrane protein whose phosphorylation correlates with an increase in contractility of myocardium and skeletal muscle. Initially described as a simple chloride channel, it has recently been shown to be a channel for taurine that acts as an osmolyte in the regulation of cell volume (Moorman et al, Adv Exp. Med. Biol., 442:219-228 (1998)).

[0562] As shown by the alignment in FIG. 10 between tha protein of SEQ ID NO:776 and PLM, the amino acid residues are identical except for positions 3 and 5 in the 92 amino acid long matched protein. The substitution of a proline residue at position 3 par another neutral residue, serine, is conservative. In addition, the protein of the invention also exhibits the typical ATP1G/PLM/MAT8 PROSITE signature (position 27 to 40 in bold in FIG. 10) for a family containing mostly proteins known to be either chloride channels or chloride channel regulators In addition, the protein of invention contains 2 short transmembrane segments from positions 1 to 21 and from 37 to 57 as predicted by the software TopPred II (Claros and von Heijne, CABIOS applic. Notes, 10:685-686 (1994)). The first segment (in italic) corresponds to the signal peptide of PLM and the second transmembrane domains (underlined) matches the transmembrane region (double-underlined) shown to be the chloride channel itself (Chen et al., Circ. Res., 82:367-374 (1998)).

[0563] Taken together, these data suggest that the protein of SEQ ID NO: 776 may be involved in the regulation of cell volume and in tissue contractility. Thus, this protein may be useful in diagnosing and/or treating several types of disorders including, but not limited to, cancer, diarrhea, fertility disorders, and in contractility disorders including muscle disorders, pulmonary disorders and myocardial disorders.

[0564] Proteins of SEQ ID NOs: 777 (Internal Designation 47-4-4-C6-CL23)

[0565] The protein of SEQ ID NO: 777 encoded by the extended cDNA SEQ ID NO: 372 found in substantia nigra shows extensive homology with the human E25 protein. The E25 protein 35 is encoded by the nucleic acid sequence of Genbank accession number AF038953. The matched protein might be involved in the development and differentiation of haematopoietic stem/progenitor cells. In addition, it is the human homologue of a murine protein thought to be involved in chondro-osteogenic differentiation and belonging to a novel multigene family of integral membrane proteins (Deleersnijder et al, J. Biol. Chem., 271:19475-19482 (1996)).

[0566] As shown by the alignments in FIG. 11 between the protein of SEQ ID NO:777 and E25, the amino acid residues are identical except for positions 9, 24 and 121 in the 263 amino acid long matched sequence. All these substitutions are conservative. In addition, the protein of invention contains one short transmembrane segment from positions 1 to 21 (underlined in FIG. 11) matching the one predicted for the murine E25 protein as predicted by the software TopPred II (Claros and von Heijne, CABIOS applic. Notes, 10:685-686 (1994)).

[0567] Taken together, these data suggest that the protein of SEQ ID NO:777 may be involved in cellular proliferation and differentiation, and/or in haematopoiesis. Thus, this protein may be useful in diagnosing and/or treating several types of disorders including, but not limited to, cancer, hematological, chondro-osteogenic and embryogenetic disorders.

[0568] Proteins of SEQ ID NO: 784 (internal designation 58-34-2-H8-CL1_{—}3)

[0569] The protein of SEQ ID NO: 784 encoded by the extended cDNA SEQ ID NO: 379 isolated from kidney shows extensive homology to the murine WW-domain binding protein 1 or WWBP-1. WWBP-1 is encoded by the nucleic acid sequence of Genbank accession number U40825. This protein is expressed in placenta, lung, liver and kidney is thought to play a role in intracellular signaling by binding to the WW domain of the Yes protooncogene-associated protein via its so-called PY domain (Chen and Sudol, Proc. Natl. Acad. Sci., 92:7819-7823 (1995)). The WW—PY domains are thought to represent a new set of modular protein-binding sequences just like the SH3—PXXP domains (Sudol et al., FEBS Lett., 369:67-71 (1995)).

[0570] As shown by the alignments of FIG. 12 between the protein of SEQ ID NO:784 and WWBP-1, the amino acid residues are identical to those of the 305 amino acid long matched protein except for positions 53, 66, 78, 89, 92, 94, 96, 100, 102, 106, 110, 113, 124, 128, 136, 139, 140, 142-144, 166, 168, 173, 176, 178, 181, 182, 188, 196, 199, 201, 202, 207 and 210 of the matched protein. 68% of these substitutions are conservative. Indeed the histidine-rich PY domain is present in the protein of the invention (positions 82-86 in bold in FIG. 12).

[0571] Taken together, these data suggest that the protein of SEQ ID NO: 784 may play a role in intracellular signaling. Thus, this protein may be useful in diagnosing and/or treating several types of disorders including, but not limited to, cancer, neurodegenerative diseases, cardiovascular disorders, hypertension, renal injury and repair and septic shock.

[0572] Protein of SEQ ID NO: 753 (Internal Designation 108-004-5-0-G6-FL)

[0573] The protein SEQ ID NO: 753 found in liver encoded by the extended cDNA SEQ ID NO:348 shows homology to a lectin-like oxidized LDL receptor (LOX-1) found in human, bovine and murine species. Such type II proteins with a C-lectin-like domain, expressed in vascular endothelium and vascular-rich organs, bind and internalize oxidatively modified low-density lipoproteins (Sawamura et al, Nature, 386:73-77, (1997)). The oxidized lipoproteins have been implicated in the pathogenesis of atherosclerosis, a leading cause of death in industrialized countries (see review by Parthasarathy et al, Biochem. Pharmacol. 56:279-284 (1998)). In addition, type II membrane proteins with a C-terminus C-type lectin domain, also known as carbohydrate-recognition domains, also include proteins involved in target-cell recognition and cell activation.

[0574] The protein of invention has the typical structure of a type II protein belonging to the C-type lectin family. Indeed, it contains a short 31-amino-acid-long N-terminal tail, a transmembrane segment from positions 32 to 52 matching the one predicted for human LOX-I and a large 177-amino-acid-long C-terminal tail as predicted by the software TopPred II (Claros and von Heijne, CABIOS applic. Notes, 10:685-686 (1994)). All six cysteines of LOX-1 C-type lectin domain are also conserved in the protein of the invention (positions 102, 113, 130, 195, 208 and 216) although the characteristic PROSITE signature of this family is not. The LOX-1 protein is encoded by the nucleic acid sequence of Genbank accession number: AB010710.

[0575] Taken together, these data suggest that the protein of SEQ ID NO:753 may be involved in the metabolism of lipids and/or in cell-cell or cell-matrix interactions and/or in cell activation. Thus, this protein or part therein, may be useful in diagnosing and treating several disorders including, but not limited to, cancer, hyperlipidaemia, cardiovascular disorders and neurodegenerative disorders.

[0576] Protein of SEQ ID NO: 767 (Internal Designation 108-008-5-O-G12-FL)

[0577] The protein SEQ ID NO: 767 encoded by the extended cDNA SEQ ID NO:362 shows homology to a mitochondrial protein found in Saccharomyces Cerevisiae (PIR:S72254) which is similar to E. Coli ribosomal protein L36. The typical PROSITE signature for ribosomal L36 is present in the protein of the invention (positions 76-102) except for a substitution of a tryptophane residue instead of a valine, leucine, isoleucine, methionine or asparagine residue.

[0578] Taken together, these data suggest that the protein of SEQ ID NO:767 may be involved in protein biosynthesis. Thus, this protein may be useful in diagnosing and/or treating several types of disorders including, but not limited to, cancer.

[0579] Protein of SEQ ID NO: 750 (Internal Designation 108-004-5-0-D10-FL)

[0580] The protein SEQ ID NO: 750 encoded by the extended cDNA SEQ ID NO: 345 shows remote homology to a subfamily of beta4-galactosyltransferases widely conserved in animals (human, rodents, cow and chicken). Such enzymes, usually type II membrane proteins located in the endoplasmic reticulum or in the Golgi apparatus, catalyzes the biosynthesis of glycoproteins, glycolipid glycans and lactose. Their characteristic features defined as those of subfamily A in Breton et al, J. Biochem., 123:1000-1009 (1998) are pretty well conserved in the protein of the invention, especially the region I containing the DVD motif (positions 163-165) thought to be involved either in UDP binding or in the catalytic process itself.

[0581] In addition, the protein of invention has the typical structure of a type II protein. Indeed, it contains a short 28-amino-acid-long N-terminal tail, a transmembrane segment from positions 29 to 49 and a large 278-amino-acid-long C-terminal tail as predicted by the software TopPred II (Claros and von Heijne, CABIOS applic. Notes, 10:685-686 (1994)).

[0582] Taken together, these data suggest that the protein of SEQ ID NO: 750 may play a role in the biosynthesis of polysaccharides, and of the carbohydrate moieties of glycoproteins and glycolipids and/or in cell-cell recognition. Thus, this protein may be useful in diagnosing and/or treating several types of disorders including, but not limited to, cancer, atherosclerosis, cardiovascular disorders, autoimmune disorders and rheumatic diseases including rheumatoid arthritis.

[0583] Protein of SEQ ID NO: 760 (Internal Designation 108-006-5-0-G2-FL)

[0584] The protein of SEQ ID NO: 760 encoded by the extended cDNA SEQ ID NO: 355 shows homology to a neuronal murine protein NP15.6 whose expression is developmentally regulated. NP15.6 protein is encoded by the nucleic acid sequence of Genbank accession number Y08702.

[0585] Taken together, these data suggest that the protein of SEQ ID NO: 760 may be involved in cellular proliferation and differentiation. Thus, this protein may be useful in diagnosing and/or treating several types of disorders including, but not limited to, cancer, neurodegenerative disorders and embryogenetic disorders.

[0586] Protein of SEQ ID NO: 769 (Internal Designation 108-009-5-0-A2-FL)

[0587] The protein of SEQ ID NO: 769 encoded by the extended cDNA SEQ ID NO: 364 shows extensive homology to the bZIP family of transcription factors, and especially to the human luman protein. (Lu et al., Mol. Cell. Biol., 17:5117-5126 (1997)). The human luman protein is encoded by the nucleic acid sequence of Genbank accession number: AF009368. The match include the whole bZIP domain composed of a basic DNA-binding domain and of a leucine zipper allowing protein dimerization. The basic domain is conserved in the protein of the invention as shown by the characteristic PROSITE signature (positions 224-237) except for a conservative substitution of a glutamic acid with an aspartic acid in position 233. The typical PROSITE signature for leucine zipper is also present (positions 259 to 280). Secreted proteins may have nucleic acid binding domain as shown by a nematode protein thought to regulate gene expression which exhibits zinc fingers as well as a functional signal peptide (Holst and Zipfel, J. Biol. Chem., 271:16275-16733, 1996).

[0588] Taken together, these data suggest that the protein of SEQ ID NO: 113 may bind to DNA, hence regulating gene expression as a transcription factor. Thus, this protein may be useful in diagnosing and/or treating several types of disorders including, but not limited to, cancer.

[0589] Proteins of SEQ ID NO:785 (Internal Designation 76-13-3-A9-CL1_{—}1)

[0590] The protein of SEQ ID NO: 785 encoded by the extended cDNA SEQ ID NO:380 shows homology with part of a human seven transmembrane protein. The human seven transmembrane protein is encoded by the nucleic acid sequence of Genbank accession number Y11395. The matched protein potentially associated to stomatin may act as a G-protein coupled receptor and is likely to be important for the signal transduction in neurons and haematopoietic cells (Mayer et al, Biochem. Biophys. Acta., 1395:301-308 (1998)).

[0591] Taken together, these data suggest that the protein of SEQ ID NO:785 may be involved in signal transduction. Thus, this protein may be useful in diagnosing and/or treating several types of disorders including, but not limited to, cancer, neurodegenerative diseases, cardiovascular disorders, hypertension, renal injury and repair and septic shock.

[0592] Proteins of SEQ ID NO: 751 (Internal Designation 108-004-5-0-E8-FL)

[0593] The protein of SEQ ID NO: 751 encoded by the extended cDNA SEQ ID NO: 346 exhibit the typical PROSITE signature for amino acid permeases (positions 5 to 66) which are integral membrane proteins involved in the transport of amino acids into the cell. In addition, the protein of invention has a transmembrane segment from positions 9 to 29 as predicted by the software TopPred II (Claros and von Heijne, CABIOS applic. Notes, 10:685-686 (1994)).

[0594] Taken together, these data suggest that the protein of SEQ ID NO: 751 may be involved in amino acid transport. Thus, this protein may be useful in diagnosing and/or treating several types of disorders including, but not limited to, cancer, aminoacidurias, neurodegenerative diseases, anorexia, chronic fatigue, coronary vascular disease, diphtheria, hypoglycemia, male infertility, muscular and myopathies.

[0595] As discussed above, the extended cDNAs of the present invention or portions thereof can be used for various purposes. The polynucleotides can be used to express recombinant protein for use for therapeutic use or research (not limited to research on the gene itself); as markers for tissues in which the corresponding protein is preferentially expressed (either constitutively or at a particular stage of tissue differentiation or development or in disease states); as molecular weight markers on Southern gels; as chromosome markers or tags (when labeled) to identify chromosomes or to map related gene positions; to compare with endogenous DNA sequences in patients to identify potential genetic disorders; as probes to hybridize and thus discover novel, related DNA sequences; as a source of information to derive PCR primers for genetic fingerprinting; for selecting and making oligomers for attachment to a “gene chip” or other support (e.g., microarrays), including for examination for expression patterns; to raise anti-protein antibodies using DNA immunization techniques; and as an antigen to raise anti-DNA antibodies or elicit another immune response. Where the polynucleotide encodes a protein which binds or potentially binds to another protein (such as, for example, in a receptor-ligand interaction), the polynucleotide can also be used in interaction trap assays (such as, for example, that described in Gyuris et al., Cell 75:791-803 (1993)) to identify polynucleotides encoding the other protein with which binding occurs or to identify inhibitors of the binding interaction.

[0596] The proteins or polypeptides provided by the present invention can similarly be used in assays to determine biological activity, including in a panel of multiple proteins for high-throughput screening; to raise antibodies or to elicit another immune response; as a reagent (including the labeled reagent) in assays designed to quantitatively determine levels of the protein (or its receptor) in biological fluids; as markers for tissues in which the corresponding protein is preferentially expressed (either constitutively or at a particular stage of tissue differentiation or development or in a disease state); and, of course, to isolate correlative receptors or ligands. Where the protein binds or potentially binds to another protein (such as, for example, in a receptor-ligand interaction), the protein can be used to identify the other protein with which binding occurs or to identify inhibitors of the binding interaction. Proteins involved in these binding interactions can also be used to screen for peptide or small molecule inhibitors or agonists of the binding interaction.

[0597] Any or all of these research utilities are capable of being developed into reagent grade or kit format for commercialization as research products.

[0598] Methods for performing the uses listed above are well known to those skilled in the art. References disclosing such methods include without limitation Molecular Cloning; A Laboratory Manual, 2d ed., Cole Spring Harbor Laboratory Press, Sambrook J., E. F. Fritsch and T. Maniatis eds., (1989), and Methods in Enzymology; Guide to Molecular Cloning Techniques, Academic Press, Berger, S. L. and A. R. Kimmel eds., (1987).

[0599] Polynucleotides and proteins of the present invention can also be used as nutritional sources or supplements. Such uses include without limitation use as a protein or amino acid supplement, use as a carbon source, use as a nitrogen source and use as a source of carbohydrate. In such cases the protein or polynucleotide of the invention can be added to the feed of a particular organism or can be administered as a separate solid or liquid preparation, such as in the form of powder, pills, solutions, suspensions or capsules. In the case of microorganisms, the protein or polynucleotide of the invention can be added to the medium in or on which the microorganism is cultured.

[0600] Although this invention has been described in terms of certain preferred embodiments, other embodiments which will be apparent to those of ordinary skill in the art in view of the disclosure herein are also within the scope of this invention. Accordingly, the scope of the invention is intended to be defined only by reference to the appended claims. Throughout this application, various publications, patents, and published patent applications are cited.

[0601] Some of the disclosures of the publications, patents, and published patent specifications referenced in this application may not have been incorporated into the present disclosure at the point of reference. Regardless of this, all of the disclosures of the publications, patents, and published patent specifications referenced in this application are hereby incorporated by reference in their entireties into the present disclosure to more fully describe the state of the art to which this invention pertains.

[0602] The nucleic acid sequences of SEQ ID NOs: 1-405 or fragments thereof may also be used to construct fusion proteins in which the polypeptide sequences of SEQ ID NOs: 406-810 or fragments thereof are fused to heterologous polypeptides. For example, the fragments of the polypeptides of SEQ ID NOs. 406-810 which are included in the fusion proteins may comprise at least 5, 10, 15, 20, 25, 30, 35, 40, 50, 75, 100, or 150 consecutive amino acids of the polypeptides of SEQ ID NOs.406-810 or may be of any length suitable for the intended purpose of the fusion protein. Nucleic acids encoding the desired fusion protein are produced by cloning a nucleic acid of SEQ ID NOs. 1-405 in frame with a nucleic acid encoding the heterologous polypeptide. The nucleic acid encoding the desired fusion protein is operably linked to a promoter in an appropriate vector, such as any of the vectors described above, and introduced into a host capable of expressing the fusion protein.

[0603] Antibodies against the polypeptides of SEQ ID NOs. 406-810 or fragments thereof may be used in immunoaffinity chromatography to isolate the polypeptides of SEQ ID NOs. 406-810 or fragments thereof or to isolate fusion proteins containing the polypeptides of SEQ ID NOs. 406-810 or fragments thereof.

[0604] The invention further relates to methods and compositions using the protein of the invention or part thereof to diagnose, prevent and/or treat several disorders in which the activity of the protein of the invention is deleterious. For diagnostic purposes, the expression of the protein of the invention could be investigated using any of the Northern blotting, RT-PCR or immunoblotting methods described herein and compared to the expression in control individuals. For prevention and/or treatment purposes, inhibiting the endogenous expression of the protein of the invention using any of the antisense or triple helix methods described herein may be used. Alternatively, inhibitors for the protein's activity may be developed and use to inhibit and/or reduce its activity using any methods known to those skilled in the art.

[0605] Chromosomal localization of the cDNA of the present invention were also determined using information from public and proprietary databases. Table XI lists the putative chromosomal location of the polynucleotides of the present invention. Column 1 lists the sequence identification number with the corresponding chromosomal location listed in column two.

[0606] The present invention also relates to methods and compositions using the chromosomal location of the polynucleotides of the invention to construct a human high resolution map or to identify a given chromosome in a sample using any techniques to those skilled in the art including those disclosed in Example 43.

[0607] Alternatively, the cDNA clone obtained by the process described in Examples 1 through 13 may not include the entire coding sequence of the protein encoded by the corresponding mRNA, although they do include sequences derived from the 5′ends of their corresponding mRNA. Such 5′EST can be used to isolate extended cDNAs which contain sequences adjacent to the 5′ ESTs. Such obtained extended cDNAs may include the entire coding sequence of the protein encoded by the corresponding mRNA, including the authentic translation start site. Examples 16 and 17 below describe methods for obtaining extended cDNAs using 5′ ESTs. Example 17 also describes methods to obtain cDNA, mRNA or genomic DNA homologous to cDNA, 5′ESTs, or fragment thereof.

[0608] The methods of Examples 16 and 17 can also be used to obtain cDNAs which encode less than the entire coding sequence of proteins encoded by the genes corresponding to the 5′ ESTs. In some embodiments, the cDNAs isolated using these methods encode at least 5, 8, 10, 12, 15, 20, 25, 30, 35, 40, 50, 60, 75, 100, 150 or 200 consecutive amino acids of one of the proteins encoded by the sequences of SEQ ID NOs. 406-810.

### EXAMPLE 16

[0609] General Method for using 5′ ESTs to Clone and Sequence cDNAs which Include the Entire Coding Region and the Authentic 5′End of the Corresponding mRNA

[0610] The following general method may be used to quickly and efficiently isolate cDNAs including sequence adjacent to the sequences of the 5′ ESTs used to obtain them. This method, ilustrated in FIG. 3, may be applied to obtain cDNAs for any 5′ EST.

[0611] The method takes advantage of the known 5′ sequence of the mRNA. A reverse transcription reaction is conducted on purified mRNA with a poly dT primer containing a nucleotide sequence at its 5′ end allowing the addition of a known sequence at the end of the cDNA which corresponds to the 3′ end of the mRNA. Such a primer and a commercially-available reverse transcriptase enzyme are added to a buffered mRNA sample yielding a reverse transcript anchored at the 3′ polyA site of the RNAs. Nucleotide monomers are then added to complete the first strand synthesis. After removal of the mRNA hybridized to the first cDNA strand by alkaline hydrolysis, the products of the alkaline hydrolysis and the residual poly dT primer can be eliminated with an exclusion column.

[0612] Subsequently, a pair of nested primers on each end is designed based on the known 5′ sequence from the 5′ EST and the known 3′ end added by the poly dT primer used in the first strand synthesis. Software used to design primers is either based on GC content and melting temperatures of oligonucleotides, such as OSP (Illier and Green, PCR Meth. Appl. 1:124-128, 1991), or based on the octamer frequency disparity method (Griffais et al., Nucleic Acids Res. 19: 3887-3891, 1991) such as PC-Rare (http://bioinformatics.weizmann.ac.il/software/PC-Rare/doc/manuel.html). Preferably, the nested primers at the 5′ end and the nested primers at the 3′ end are separated from one another by four to nine bases. These primer sequences may be selected to have melting temperatures and specificities suitable for use in PCR.

[0613] A first PCR run is performed using the outer primer from each of the nested pairs. A second PCR run using the inner primer from each of the nested pairs is then performed on a small aliquot of the first PCR product. Thereafter, the primers and remaining nucleotide monomers are removed.

[0614] Due to the lack of position constraints on the design of 5′ nested primers compatible for PCR use using the OSP software, amplicons of two types are obtained. Preferably, the second 5′ primer is located upstream of the translation initiation codon thus yielding a nested PCR product containing the entire coding sequence. Such a cDNA may be used in a direct cloning procedure such as the one described in example 4.

[0615] However, in some cases, the second 5′ primer is located downstream of the translation initiation codon, thereby yielding a PCR product containing only part of the ORF. For such amplicons which do not contain the complete coding sequence, intermediate steps are necessary to obtain both the complete coding sequence and a PCR product containing the full coding sequence. The complete coding sequence can be assembled from several partial sequences determined directly from different PCR products. Once the full coding sequence has been completely determined, new primers compatible for PCR use are then designed to obtain amplicons containing the whole coding region. However, in such cases, 3′ primers compatible for PCR use are located inside the 3′ UTR of the corresponding mRNA, thus yielding amplicons which lack part of this region, i.e. the polyA tract and sometimes the polyadenylation signal, as illustrated in FIG. 3. Such obtained cDNAs are then cloned into an appropriate vector using a procedure essentially similar to the one described in example 4.

[0616] Full-length PCR products are then sequenced using a procedure similar to the one described in example 11. Completion of the sequencing of a given cDNA fragment may be assessed by comparing the sequence length to the size of the corresponding nested PCR product. When Northern blot data are available, the size of the mRNA detected for a given PCR product may also be used to finally assess that the sequence is complete. Sequences which do not fulfill these criteria are discarded and will undergo a new isolation procedure.

[0617] Full-length PCR products are then cloned in an appropriate vector. For example, the cDNAs can be cloned into a vector using a procedure similar to the one described in example 4. Such full-length cDNA clones are then double-sequenced and submitted to computer analyses using procedure essentially similar to the ones described in Examples 11 through 13. However, it will be appreciated that full-length cDNA clones obtained from amplicons lacking part of the 3′UTR may lack polyadenylations sites and signals.

### EXAMPLE 17

[0618] 25 Methods for Obtaining cDNAs or Nucleic Acids Homologous to cDNAs or Fragments Thereof

[0619] In addition to PCR based methods for obtaining cDNAs, traditional hybridization based methods may also be employed. These methods may also be used to obtain the genomic DNAs which encode the mRNAs from which the cDNA is derived, mRNAs corresponding to the cDNAs, or nucleic acids which are homologous to cDNAs or fragments thereof. Indeed, cDNAs of the present invention or fragments thereof, including 5′ESTs, may also be used to isolate cDNAs or nucleic acids homologous to cDNAs from a cDNA library or a genomic DNA library as follows. Such cDNA libraries or genomic DNA libraries may be obtained from a commercial source or made using techniques familiar to those skilled in the art such as the one described in Examples 1 through 5. An example of such hybridization-based methods is provided below.

[0620] Techniques for identifying cDNA clones in a cDNA library which hybridize to a given probe sequence are disclosed in Sambrook et al., Molecular Cloning: A Laboratory Manual 2d Ed., Cold Spring Harbor Laboratory Press, 1989, the disclosure of which is incorporated herein by reference. The same techniques may be used to isolate genomic DNAs.

[0621] Briefly, cDNA or genomic DNA clones which hybridize to the detectable probe are identified and isolated for further manipulation as follows. A probe comprising at least 10 consecutive nucleotides from the cDNA or fragment thereof is labeled with a detectable label such as a radioisotope or a fluorescent molecule. Preferably, the probe comprises at least 12, 15, or 17 consecutive nucleotides from the cDNA or fragment thereof. More preferably, the probe comprises 20 to 30 consecutive nucleotides from the cDNA or fragment thereof. In some embodiments, the probe comprises more than 30 nucleotides from the cDNA or fragment thereof.

[0622] Techniques for labeling the probe are well known and include phosphorylation with polynucleotide kinase, nick translation, in vitro transcription, and non radioactive techniques. The cDNAs or genomic DNAs in the library are transferred to a nitrocellulose or nylon filter and denatured. After blocking of non specific sites, the filter is incubated with the labeled probe for an amount of time sufficient to allow binding of the probe to cDNAs or genomic DNAs containing a sequence capable of hybridizing thereto.

[0623] By varying the stringency of the hybridization conditions used to identify cDNAs or genomic DNAs which hybridize to the detectable probe, cDNAs or genomic DNAs having different levels of identity to the probe can be identified and isolated as described below.

[0624] 1. Isolation of cDNA or Genomic DNA Sequences Having a High Degree of Identity to the Labeled Probe

[0625] To identify cDNAs or genomic DNAs having a high degree of identity to the probe sequence, the melting temperature of the probe may be calculated using the following formulas:

[0626] For probes between 14 and 70 nucleotides in length the melting temperature (Tm) is calculated using the formula: Tm=81.5+16.6(log (Na+))+0.41(fraction G+C)−(600/N) where N is the length of the probe.

[0627] If the hybridization is carried out in a solution containing formamide, the melting temperature may be calculated using the equation T=81.5+16.6(log (Na+))+0.41(fraction G+C)−(0.63% formamide)−(600/N) where N is the length of the probe.

[0628] Prehybridization may be carried out in 6×SSC, 5× Denhardt's reagent, 0.5% SDS, 100 μg denatured fragmented salmon sperm DNA or 6×SSC, 5× Denhardt's reagent, 0.5% SDS, 100 μg denatured fragmented salmon sperm DNA, 50% formamide. The formulas for SSC and Denhardt's solutions are listed in Sambrook et al., supra.

[0629] Hybridization is conducted by adding the detectable probe to the prehybridization solutions listed above. Where the probe comprises double stranded DNA, it is denatured before addition to the hybridization solution. The filter is contacted with the hybridization solution for a sufficient period of time to allow the probe to hybridize to cDNAs or genomic DNAs containing sequences complementary thereto or homologous thereto. For probes over 200 nucleotides in length, the hybridization may be carried out at 15-25° C. below the Tm. For shorter probes, such as oligonucleotide probes, the hybridization may be conducted at 15-25° C. below the Tm. Preferably, for hybridizations in 6×SSC, the hybridization is conducted at approximately 68° C. Preferably, for hybridizations in 50% formamide containing solutions, the hybridization is conducted at approximately 42° C.

[0630] All of the foregoing hybridizations would be considered to be under “stringent” conditions.

[0631] Following hybridization, the filter is washed in 2×SSC, 0.1% SDS at room temperature for 15 minutes. The filter is then washed with 0.1×SSC, 0.5% SDS at room temperature for 30 minutes to 1 hour. Thereafter, the solution is washed at the hybridization temperature in 0.1×SSC, 0.5% SDS. A final wash is conducted in 0.1×SSC at room temperature.

[0632] cDNAs or genomic DNAs which have hybridized to the probe are identified by autoradiography or other conventional techniques.

[0633] 2. Isolation of cDNA or Genomic DNA Sequences Having Lower Degrees of Identity to the Labeled Probe

[0634] The above procedure may be modified to identify cDNAs or genomic DNAs having decreasing levels of identity to the probe sequence. For example, to obtain cDNAs or genomic DNAs of decreasing identity to the detectable probe, less stringent conditions may be used. For example, the hybridization temperature may be decreased in increments of 5° C. from 68° C. to 42° C. in a hybridization buffer having a sodium concentration of approximately 1M. Following hybridization, the filter may be washed with 2×SSC, 0.5% SDS at the temperature of hybridization. These conditions are considered to be “moderate” conditions above 50° C. and “low” conditions below 50° C.

[0635] Alternatively, the hybridization may be carried out in buffers, such as 6×SSC, containing formamide at a temperature of 42° C. In this case, the concentration of formamide in the hybridization buffer may be reduced in 5% increments from 50% to 0% to identify clones having decreasing levels of identity to the probe. Following hybridization, the filter may be washed with 6×SSC, 0.5% SDS at 50° C. These conditions are considered to be “moderate” conditions above 25% formamide and “low” conditions below 25% formamide. cDNAs or genomic DNAs which have hybridized to the probe are identified by autoradiography or other conventional techniques.

[0636] 3. Determination of the Degree of Identity between the Obtained cDNAs or Genomic DNAs and cDNAs or Fragments thereof used as the Labeled Probe or Between the Polypeptides Encoded by the Obtained cDNAs or Genomic DNAs and the Polypeptides Encoded by the cDNAs or Fragment Thereof Used as the Labeled Probe

[0637] To determine the level of identity between the hybridized cDNA or genomic DNA and the cDNA or fragment thereof from which the probe was derived, the nucleotide sequences of the hybridized nucleic acid and the cDNA or fragment thereof from which the probe was derived are compared. The sequences of the cDNA or fragment thereof from which the probe was derived and the sequences of the cDNA or genomic DNA which hybridized to the detectable probe may be stored on a computer readable medium as described below and compared to one another using any of a variety of algorithms familiar to those skilled in the art such as those described below.

[0638] To determine the level of identity between the polypeptide encoded by the hybridizing cDNA or genomic DNA and the polypeptide encoded by the cDNA or fragment thereof from which the probe was derived, the polypeptide sequence encoded by the hybridized nucleic acid and the polypeptide sequence encoded by the cDNA or fragment thereof from which the probe was derived are compared. The sequences of the polypeptide encoded by the cDNA or fragment thereof from which the probe was derived and the polypeptide sequence encoded by the cDNA or genomic DNA which hybridized to the detectable probe may be stored on a computer readable medium as described below and compared to one another using any of a variety of algorithms familiar to those skilled in the art such as those described below.

[0639] Protein and/or nucleic acid sequence homologies may be evaluated using any of the variety of sequence comparison algorithms and programs known in the art. Such algorithms and programs include, but are by no means limited to, TBLASTN, BLASTP, FASTA, TFASTA, and CLUSTALW (Pearson and Lipman, 1988, Proc. Natl. Acad. Sci. USA 85(8):2444-2448; Altschul et al., 1990, J. Mol. Biol. 215(3):403-410; Thompson et al., 1994, Nucleic Acids Res. 22(2):4673-4680; Higgins et al., 1996, Methods Enzymol. 266:383-402; Altschul et al., 1990, J. Mol. Biol. 215(3):403-410; Altschul et al., 1993, Nature Genetics 3:266-272).

[0640] In a particularly preferred embodiment, protein and nucleic acid sequence homologies are evaluated using the Basic Local Alignment Search Tool (“BLAST”) which is well known in the art (see, e.g., Karlin and Altschul, 1990, Proc. Natl. Acad. Sci. USA 87:2267-2268; Altschul et al., 1990, J. Mol. Biol. 215:403-410; Altschul et al., 1993, Nature Genetics 3:266-272; Altschul et al., 1997, Nuc. Acids Res. 25:3389-3402). In particular, five specific BLAST programs are used to perform the following task:

[0641] (1) BLASTP and BLAST3 compare an amino acid query sequence against a protein sequence database;

[0642] (2) BLASTN compares a nucleotide query sequence against a nucleotide sequence database;

[0643] (3) BLASTX compares the six-frame conceptual translation products of a query nucleotide sequence (both strands) against a protein sequence database;

[0644] (4) TBLASTN compares a query protein sequence against a nucleotide sequence database translated in all six reading frames (both strands); and

[0645] (5) TBLASTX compares the six-frame translations of a nucleotide query sequence against the six-frame translations of a nucleotide sequence database.

[0646] The BLAST programs identify homologous sequences by identifying similar segments, which are referred to herein as “high-scoring segment pairs,” between a query amino or nucleic acid sequence and a test sequence which is preferably obtained from a protein or nucleic acid sequence database. High-scoring segment pairs are preferably identified (i.e., aligned) by means of a scoring matrix, many of which are known in the art. Preferably, the scoring matrix used is the BLOSUM62 matrix (Gonnet et al., 1992, Science 256:1443-1445; Henikoff and Henikoff, 1993, Proteins 17:49-61). Less preferably, the PAM or PAM250 matrices may also be used (see, e.g., Schwartz and Dayhoff, eds., 1978, Matrices for Detecting Distance Relationships: Atlas of Protein Sequence and Structure, Washington: National Biomedical Research Foundation)

[0647] The BLAST programs evaluate the statistical significance of all high-scoring segment pairs identified, and preferably selects those segments which satisfy a user-specified threshold of significance, such as a user-specified percent identity. Preferably, the statistical significance of a high-scoring segment pair is evaluated using the statistical significance formula of Karlin (see, e.g., Karlin and Altschul, 1990, Proc. Natl. Acad. Sci. USA 87:2267-2268).

[0648] The parameters used with the above algorithms may be adapted depending on the sequence length and degree of identity studied. In some embodiments, the parameters may be the default parameters used by the algorithms in the absence of instructions from the user.

[0649] In some embodiments, the level of identity between the hybridized nucleic acid and the cDNA or fragment thereof from which the probe was derived may be determined using the FASTDB algorithm described in Brutlag et al. Comp. App. Biosci. 6:237-245, 1990. In such analyses the parameters may be selected as follows: Matrix=Unitary, k-tuple=4, Mismatch Penalty=1, Joining Penalty=30, Randomization Group Length=0, Cutoff Score=1, Gap Penalty=5, Gap Size Penalty=0.05, Window Size=500 or the length of the sequence which hybridizes to the probe, whichever is shorter. Because the FASTDB program does not consider 5′ or 3′ truncations when calculating identity levels, if the sequence which hybridizes to the probe is truncated relative to the sequence of the cDNA or fragment thereof from which the probe was derived the identity level is manually adjusted by calculating the number of nucleotides of the cDNA or fragment thereof which are not matched or aligned with the hybridizing sequence, determining the percentage of total nucleotides of the hybridizing sequence which the non-matched or non-aligned nucleotides represent, and subtracting this percentage from the identity level. For example, if the hybridizing sequence is 700 nucleotides in length and the cDNA or fragment thereof sequence is 1000 nucleotides in length wherein the first 300 bases at the 5′end of the cDNA or fragment thereof are absent from the hybridizing sequence, and wherein the overlapping 700 nucleotides are identical, the identity level would be adjusted as follows. The non-matched, non-aligned 300 bases represent 30% of the length of the cDNA or fragment thereof. If the overlapping 700 nucleotides are 100% identical, the adjusted identity level would be 100−30=70% identity. It should be noted that the preceding adjustments are only made when the non-matched or non-aligned nucleotides are at the 5′ or 3′ends. No adjustments are made if the non-matched or non-aligned sequences are internal or under any other conditions.

[0650] For example, using the above methods, nucleic acids having at least 95% nucleic acid identity, at least 96% nucleic acid identity, at least 97% nucleic acid identity, at least 98% nucleic acid identity, at least 99% nucleic acid identity, or more than 99% nucleic acid identity to the cDNA or fragment thereof from which the probe was derived may be obtained and identified. Such nucleic acids may be allelic variants or related nucleic acids from other species. Similarly, by using progressively less stringent hybridization conditions one can obtain and identify nucleic acids having at least 90%, at least 85%, at least 80% or at least 75% identity to the cDNA or fragment thereof from which the probe was derived.

[0651] Using the above methods and algorithms such as FASTA with parameters depending on the sequence length and degree of identity studied, for example the default parameters used by the algorithms in the absence of instructions from the user, one can obtain nucleic acids encoding proteins having at least 99%, at least 98%, at least 97%, at least 96%, at least 95%, at least 90%, at least 85%, at least 80% or at least 75% identity to the protein encoded by the cDNA or fragment thereof from which the probe was derived. In some embodiments, the identity levels can be determined using the “default” opening penalty and the “default” gap penalty, and a scoring matrix such as PAM 250 (a standard scoring matrix; see Dayhoff et al., in: Atlas of Protein Sequence and Structure, Vol. 5, Supp. 3 (1978)).

[0652] Alternatively, the level of polypeptide identity may be determined using the FASTDB algorithm described by Brutlag et al. Comp. App. Biosci. 6:237-245, 1990. In such analyses the parameters may be selected as follows: Matrix=PAM 0, k-tuple=2, Mismatch Penalty=1, Joining Penalty-20, Randomization Group Length=0, Cutoff Score=1, Window Size=Sequence Length, Gap Penalty=5, Gap Size Penalty=0.05, Window Size=500 or the length of the homologous sequence, whichever is shorter. If the homologous amino acid sequence is shorter than the amino acid sequence encoded by the cDNA or fragment thereof as a result of an N terminal and/or C terminal deletion the results may be manually corrected as follows. First, the number of amino acid residues of the amino acid sequence encoded by the cDNA or fragment thereof which are not matched or aligned with the homologous sequence is determined. Then, the percentage of the length of the sequence encoded by the cDNA or fragment thereof which the non-matched or non-aligned amino acids represent is calculated. This percentage is subtracted from the identity level. For example wherein the amino acid sequence encoded by the cDNA or fragment thereof is 100 amino acids in length and the length of the homologous sequence is 80 amino acids and wherein the amino acid sequence encoded by the cDNA or fragment thereof is truncated at the N terminal end with respect to the homologous sequence, the identity level is calculated as follows. In the preceding scenario there are 20 non-matched, non-aligned amino acids in the sequence encoded by the cDNA or fragment thereof. This represents 20% of the length of the amino acid sequence encoded by the cDNA or fragment thereof. If the remaining amino acids are 100% identical between the two sequences, the identity level would be 100%-20%=80% identity. No adjustments are made if the non-matched or non-aligned sequences are internal or under any other conditions.

[0653] In addition to the above described methods, other protocols are available to obtain homologous cDNAs using cDNA of the present invention or fragment thereof as outlined in the following paragraphs.

[0654] cDNAs may be prepared by obtaining mRNA from the tissue, cell, or organism of interest using mRNA preparation procedures utilizing polyA selection procedures or other techniques known to those skilled in the art. A first primer capable of hybridizing to the polyA tail of the mRNA is hybridized to the mRNA and a reverse transcription reaction is performed to generate a first cDNA strand.

[0655] The first cDNA strand is hybridized to a second primer containing at least 10 consecutive nucleotides of the sequences of SEQ ID NOs 1-405. Preferably, the primer comprises at least 10, 12, 15, 17, 18, 20, 23, 25, or 28 consecutive nucleotides from the sequences of SEQ ID NOs 1-405. In some embodiments, the primer comprises more than 30 nucleotides from the sequences of SEQ ID NOs 1-405. If it is desired to obtain cDNAs containing the full protein coding sequence, including the authentic translation initiation site, the second primer used contains sequences located upstream of the translation initiation site. The second primer is extended to generate a second cDNA strand complementary to the first cDNA strand. Alternatively, RT-PCR may be performed as described above using primers from both ends of the cDNA to be obtained.

[0656] cDNAs containing 5′ fragments of the mRNA may be prepared by hybridizing an mRNA comprising the sequences of SEQ ID NOs. 1-405 with a primer comprising a complementary to a fragment of the known cDNA, genomic DNA or fragment thereof hybridizing the primer to the mRNAs, and reverse transcribing the hybridized primer to make a first cDNA strand from the mRNAs. Preferably, the primer comprises at least 10, 12, 15, 17, 18, 20, 23, 25, or 28 consecutive nucleotides of the sequences complementary to SEQ ID NOs. 1-405.

[0657] Thereafter, a second cDNA strand complementary to the first cDNA strand is synthesized. The second cDNA strand may be made by hybridizing a primer complementary to sequences in the first cDNA strand to the first cDNA strand and extending the primer to generate the second cDNA strand.

[0658] The double stranded cDNAs made using the methods described above are isolated and cloned. The cDNAs may be cloned into vectors such as plasmids or viral vectors capable of replicating in an appropriate host cell. For example, the host cell may be a bacterial, mammalian, avian, or insect cell.

[0659] Techniques for isolating mRNA, reverse transcribing a primer hybridized to mRNA to generate a first cDNA strand, extending a primer to make a second cDNA strand complementary to the first cDNA strand, isolating the double stranded cDNA and cloning the double stranded cDNA are well known to those skilled in the art and are described in Current Protocols in Molecular Biology, John Wiley & Sons, Inc. 1997 and Sambrook et al., Molecular Cloning: A Laboratory Manual, Second Edition, Cold Spring Harbor Laboratory Press, 1989.

[0660] Alternatively, other procedures may be used for obtaining full-length cDNAs or homologous cDNAs. In one approach, cDNAs are prepared from mRNA and cloned into double stranded phagemids as follows. The cDNA library in the double stranded phagemids is then rendered single stranded by treatment with an endonuclease, such as the Gene II product of the phage Fl and an exonuclease (Chang et al., Gene 127:95-8, 1993). A biotinylated oligonucleotide comprising the sequence of a fragment of a known cDNA, genomic DNA or fragment thereof is hybridized to the single stranded phagemids. Preferably, the fragment comprises at least 10, 12, 15, 17, 18, 20, 23, 25, or 28 consecutive nucleotides of the sequences of SEQ ID NOs. 1-405.

[0661] Hybrids between the biotinylated oligonucleotide and phagemids are isolated by incubating the hybrids with streptavidin coated paramagnetic beads and retrieving the beads with a magnet (Fry et al., Biotechniques, 13: 124-131, 1992). Thereafter, the resulting phagemids are released from the beads and converted into double stranded DNA using a primer specific for the cDNA or fragment thereof used to design the biotinylated oligonucleotide. Alternatively, protocols such as the Gene Trapper kit (Gibco BRL) may be used. The resulting double stranded DNA is transformed into bacteria. Homologous cDNAs or full length cDNAs containing the cDNA or fragment thereof sequence are identified by colony PCR or colony hybridization.

[0662] Using any of the above described methods, a plurality of cDNAs containing full-length protein coding sequences or fragments of the protein coding sequences may be provided as cDNA libraries for subsequent evaluation of the encoded proteins or use in diagnostic assays as described below.

[0663] cDNAs prepared by any method described therein may be subsequently engineered to obtain nucleic acids which include desired fragments of the cDNA using conventional techniques such as subcloning, PCR, or in vitro oligonucleotide synthesis. For example, nucleic acids which include only the full coding sequences (i.e. the sequences encoding the signal peptide and the mature protein remaining after the signal peptide peptide is cleaved off) may be obtained using techniques known to those skilled in the art. Alternatively, conventional techniques may be applied to obtain nucleic acids which contain only the coding sequence for the mature protein remaining after the signal peptide is cleaved off or nucleic acids which contain only the coding sequences for the signal peptides.

[0664] Similarly, nucleic acids containing any other desired fragment of the coding sequences for the encoded protein may be obtained. For example, the nucleic acid may contain at least 8, 10, 12, 15, 18, 20, 25, 28, 30, 35, 40, 50, 75, 100, 150, 200, 300, 400, 500, 1000 or 2000 consecutive bases of a cDNA.

[0665] Once a cDNA has been obtained, it can be sequenced to determine the amino acid sequence it encodes. Once the encoded amino acid sequence has been determined, one can create and identify any of the many conceivable cDNAs that will encode that protein by simply using the degeneracy of the genetic code. For example, allelic variants or other homologous nucleic acids can be identified as described below. Alternatively, nucleic acids encoding the desired amino acid sequence can be synthesized in vitro.

[0666] In a preferred embodiment, the coding sequence may be selected using the known codon or codon pair preferences for the host organism in which the cDNA is to be expressed.

[0667] IV. Use of cDNA or Fragments thereof to Express Proteins and uses of those Expressed Proteins

[0668] Using any of the above described methods, cDNAs containing the full protein coding sequences of their corresponding mRNAs or portions thereof, such as cDNAs encoding the mature protein, may be used to express the secreted proteins or portions thereof which they encode as described below. If desired, the cDNAs may contain the sequences encoding the signal peptide to facilitate secretion of the expressed protein. It will be appreciated that a plurality of extended cDNAs containing the full protein coding sequences or portions thereof may be simultaneously cloned into expression vectors to create an expression library for analysis of the encoded proteins as described below.

### EXAMPLE 18

[0669] Expression of the Proteins Encoded by cDNAs or Fragments thereof

[0670] To express the proteins encoded by the cDNAs or fragments thereof, nucleic acids containing the coding sequence for the proteins or fragments thereof to be expressed are obtained as described above and cloned into a suitable expression vector. If desired, the nucleic acids may contain the sequences encoding the signal peptide to facilitate secretion of the expressed protein. For example, the nucleic acid may comprise the sequence of one of SEQ ID NOs: 1-405 listed in Table I and in the accompanying sequence listing. Alternatively, the nucleic acid may comprise those nucleotides which make up the full coding sequence of one of the sequences of SEQ ID NOs: 1-405 as defined in Table I above.

[0671] It will be appreciated that should the extent of the full coding sequence (i.e. the sequence encoding the signal peptide and the mature protein resulting from cleavage of the signal peptide) differ from that listed in Table I as a result of a sequencing error, reverse transcription or amplification error, mRNA splicing, post-translational modification of the encoded protein, enzymatic cleavage of the encoded protein, or other biological factors, one skilled in the art would be readily able to identify the extent of the full coding sequences in the sequences of SEQ ID NOs. 1-405. Accordingly, the scope of any claims herein relating to nucleic acids containing the full coding sequence of one of SEQ ID NOs. 1-405 is not to be construed as excluding any readily identifiable variations from or equivalents to the full coding sequences listed in Table I. Similarly, should the extent of the fall length polypeptides differ from those indicated in Table II as a result of any of the preceding factors, the scope of claims relating to polypeptides comprising the amino acid sequence of the full length polypeptides is not to be construed as excluding any readily identifiable variations from or equivalents to the sequences listed in Table II.

[0672] Alternatively, the nucleic acid used to express the protein or fragment thereof may comprise those nucleotides which encode the mature protein (i.e. the protein created by cleaving the signal peptide off) encoded by one of the sequences of SEQ ID NOs: 1-405 as defined in Table I above.

[0673] It will be appreciated that should the extent of the sequence encoding the mature protein differ from that listed in Table I as a result of a sequencing error, reverse transcription or amplification error, mRNA splicing, post-translational modification of the encoded protein, enzymatic cleavage of the encoded protein, or other biological factors, one skilled in the art would be readily able to identify the extent of the sequence encoding the mature protein in the sequences of SEQ ID NOs. 1405. Accordingly, the scope of any claims herein relating to nucleic acids containing the sequence encoding the mature protein encoded by one of SEQ ID NOs. 1-405 is not to be construed as excluding any readily identifiable variations from or equivalents to the sequences listed in Table I. Thus, claims relating to nucleic acids containing the sequence encoding the mature protein encompass equivalents to the sequences listed in Table I, such as sequences encoding biologically active proteins resulting from post-translational modification, enzymatic cleavage, or other readily identifiable variations from or equivalents to the secreted proteins in addition to cleavage of the signal peptide. Similarly, should the extent of the mature polypeptides differ from those indicated in Table II as a result of any of the preceding factors, the scope of claims relating to polypeptides comprising the sequence of a mature protein included in the sequence of one of SEQ ID NOs. 406-810 is not to be construed as excluding any readily identifiable variations from or equivalents to the sequences listed in Table II. Thus, claims relating to polypeptides comprising the sequence of the mature protein encompass equivalents to the sequences listed in Table II, such as biologically active proteins resulting from post-translational modification, enzymatic cleavage, or other readily identifiable variations from or equivalents to the secreted proteins in addition to cleavage of the signal peptide. It will also be appreciated that should the biologically active form of the polypeptides included in the sequence of one of SEQ ID NOs. 406-810 or the nucleic acids encoding the biologically active form of the polypeptides differ from those identified as the mature polypeptide in Table II or the nucleotides encoding the mature polypeptide in Table I as a result of a sequencing error, reverse transcription or amplification error, mRNA splicing, post-translational modification of the encoded protein, enzymatic cleavage of the encoded protein, or other biological factors, one skilled in the art would be readily able to identify the amino acids in the biologically active form of the polypeptides and the nucleic acids encoding the biologically active form of the polypeptides. In such instances, the claims relating to polypetides comprising the mature protein included in one of SEQ ID NOs. 406-810 or nucleic acids comprising the nucleotides of one of SEQ ID NOs. 1405 encoding the mature protein shall not be construed to exclude any readily identifiable variations from the sequences listed in Table I and Table II.

[0674] In some embodiments, the nucleic acid used to express the protein or fragment thereof may comprise those nucleotides which encode the signal peptide encoded by one of the sequences of SEQ ID NOs: 1-405 as defined in Table I above.

[0675] It will be appreciated that should the extent of the sequence encoding the signal peptide differ from that listed in Table I as a result of a sequencing error, reverse transcription or amplification error, mRNA splicing, post-translational modification of the encoded protein, enzymatic cleavage of the encoded protein, or other biological factors, one skilled in the art would be readily able to identify the extent of the sequence encoding the signal peptide in the sequences of SEQ ID NOs. 1-405. Accordingly, the scope of any claims herein relating to nucleic acids containing the sequence encoding the signal peptide encoded by one of SEQ ID NOs.1-405 is not to be construed as excluding any readily identifiable variations from the sequences listed in Table I. Similarly, should the extent of the signal peptides differ from those indicated in Table II as a result of any of the preceding factors, the scope of claims relating to polypeptides comprising the sequence of a signal peptide included in the sequence of one of SEQ ID NOs. 406-810 is not to be construed as excluding any readily identifiable variations from the sequences listed in Table II.

[0676] Alternatively, the nucleic acid may encode a polypeptide comprising at least 5 consecutive amino acids of one of the sequences of SEQ ID NOs: 406-810. In some embodiments, the nucleic acid may encode a polypeptide comprising at least 8, 10, 12, 15, 20, 25, 30, 35, 40, 50, 60, 75, 100, 150 or 200 consecutive amino acids of one of the sequences of SEQ ID NOs: 406-810.

[0677] The nucleic acids inserted into the expression vectors may also contain sequences upstream of the sequences encoding the signal peptide, such as sequences which regulate expression levels or sequences which confer tissue specific expression.

[0678] The nucleic acid encoding the protein or polypeptide to be expressed is operably linked to a promoter in an expression vector using conventional cloning technology. The expression vector may be any of the mammalian, yeast, insect or bacterial expression systems known in the art. Commercially available vectors and expression systems are available from a variety of suppliers including Genetics Institute (Cambridge, Mass.), Stratagene (La Jolla, Calif.), Promega (Madison, Wis.), and Invitrogen (San Diego, Calif.). If desired, to enhance expression and facilitate proper protein folding, the codon context and codon pairing of the sequence may be optimized for the particular expression organism in which the expression vector is introduced, as explained by Hatfield, et al., U.S. Pat. No. 5,082,767, incorporated herein by this reference.

[0679] The following is provided as one exemplary method to express the proteins encoded by the cDNAs or the nucleic acids described above. First, the methionine initiation codon for the gene and the poly A signal of the gene are identified. If the nucleic acid encoding the polypeptide to be expressed lacks a methionine to serve as the initiation site, an initiating methionine can be introduced next to the first codon of the nucleic acid using conventional techniques. Similarly, if the cDNA lacks a poly A signal, this sequence can be added to the construct by, for example, splicing out the Poly A signal from pSG5 (Stratagene) using BglI and SalI restriction endonuclease enzymes and incorporating it into the mammalian expression vector pXT1 (Stratagene). pXT1 contains the LTRs and a fragment of the gag gene from Moloney Murine Leukemia Virus. The position of the LTRs in the construct allow efficient stable transfection. The vector includes the Herpes Simplex Thymidine Kinase promoter and the selectable neomycin gene. The cDNA or fragment thereof encoding the polypeptide to be expressed is obtained by PCR from the bacterial vector using oligonucleotide primers complementary to the cDNA or fragment thereof and containing restriction endonuclease sequences for Pst I incorporated into the 5′primer and BglII at the 5′ end of the corresponding cDNA 3′ primer, taking care to ensure that the cDNA is positioned in frame with the poly A signal. The purified fragment obtained from the resulting PCR reaction is digested with PstI, blunt ended with an exonuclease, digested with Bgl II, purified and ligated to pXT1, now containing a poly A signal and digested with BglII.

[0680] The ligated product is transfected into mouse NIH 3T3 cells using Lipofectin (Life Technologies, Inc., Grand Island, N.Y.) under conditions outlined in the product specification. Positive transfectants are selected after growing the transfected cells in 600 ug/ml G418 (Sigma, St. Louis, Mo.). Preferably the expressed protein is released into the culture medium, thereby facilitating purification.

[0681] Alternatively, the cDNAs may be cloned into pED6dpc2 (DiscoverEase, Genetics Institute, Cambridge, Mass.). The resulting pED6dpc2 constructs may be transfected into a suitable host cell, such as COS 1 cells. Methotrexate resistant cells are selected and expanded. Preferably, the protein expressed from the cDNA is released into the culture medium thereby facilitating purification.

[0682] Proteins in the culture medium are separated by gel electrophoresis. If desired, the proteins may be ammonium sulfate precipitated or separated based on size or charge prior to electrophoresis.

[0683] As a control, the expression vector lacking a cDNA insert is introduced into host cells or organisms and the proteins in the medium are harvested. The secreted proteins present in the medium are detected using techniques such as Coomassie or silver staining or using antibodies against the protein encoded by the cDNA. Coomassie and silver staining techniques are familiar to those skilled in the art.

[0684] Antibodies capable of specifically recognizing the protein of interest may be generated using synthetic 15-mer peptides having a sequence encoded by the appropriate 5′ EST, cDNA, or fragment thereof. The synthetic peptides are injected into mice to generate antibody to the polypeptide encoded by the 5′ EST, cDNA, or fragment thereof.

[0685] Secreted proteins from the host cells or organisms containing an expression vector which contains the cDNA or a fragment thereof are compared to those from the control cells or organism. The presence of a band in the medium from the cells containing the expression vector which is absent in the medium from the control cells indicates that the cDNA encodes a secreted protein. Generally, the band corresponding to the protein encoded by the cDNA will have a mobility near that expected based on the number of amino acids in the open reading frame of the cDNA. However, the band may have a mobility different than that expected as a result of modifications such as glycosylation, ubiquitination, or enzymatic cleavage.

[0686] Alternatively, if the protein expressed from the above expression vectors does not contain sequences directing its secretion, the proteins expressed from host cells containing an expression vector containing an insert encoding a secreted protein or fragment thereof can be compared to the proteins expressed in host cells containing the expression vector without an insert. The presence of a band in samples from cells containing the expression vector with an insert which is absent in samples from cells containing the expression vector without an insert indicates that the desired protein or fragment thereof is being expressed. Generally, the band will have the mobility expected for the secreted protein or fragment thereof. However, the band may have a mobility different than that expected as a result of modifications such as glycosylation, ubiquitination, or enzymatic cleavage.

[0687] The protein encoded by the cDNA may be purified using standard immunochromatography techniques. In such procedures, a solution containing the secreted protein, such as the culture medium or a cell extract, is applied to a column having antibodies against the secreted protein attached to the chromatography matrix. The secreted protein is allowed to bind the immunochromatography column. Thereafter, the column is washed to remove non-specifically bound proteins. The specifically bound secreted protein is then released from the column and recovered using standard techniques.

[0688] If antibody production is not possible, the cDNA sequence or fragment thereof may be incorporated into expression vectors designed for use in purification schemes employing chimeric polypeptides. In such strategies the coding sequence of the cDNA or fragment thereof is inserted in frame with the gene encoding the other half of the chimera. The other half of the chimera may be β-globin or a nickel binding polypeptide encoding sequence. A chromatography matrix having antibody to β-globin or nickel attached thereto is then used to purify the chimeric protein. Protease cleavage sites may be engineered between the β-globin gene or the nickel binding polypeptide and the cDNA or fragment thereof. Thus, the two polypeptides of the chimera may be separated from one another by protease digestion.

[0689] One useful expression vector for generating β-globin chimerics is pSG5 (Stratagene), which encodes rabbit β-globin. Intron II of the rabbit β-globin gene facilitates splicing of the expressed transcript, and the polyadenylation signal incorporated into the construct increases the level of expression. These techniques as described are well known to those skilled in the art of molecular biology. Standard methods are published in methods texts such as Davis et al., (Basic Methods in Molecular Biology, L. G. Davis, M. D. Dibner, and J. F. Battey, ed., Elsevier Press, NY, 1986) and many of the methods are available from Stratagene, Life Technologies, Inc., or Promega. Polypeptide may additionally be produced from the construct using in vitro translation systems such as the In vitro Express™ Translation Kit (Stratagene).

[0690] Following expression and purification of the secreted proteins encoded by the 5′ ESTs, cDNAs, or fragments thereof, the purified proteins may be tested for the ability to bind to the surface of various cell types as described below. It will be appreciated that a plurality of proteins expressed from these cDNAs may be included in a panel of proteins to be simultaneously evaluated for the activities specifically described below, as well as other biological roles for which assays for determining activity are available.

[0691] Alternatively, the polypeptide to be expressed may also be a product of transgenic animals, i.e., as a component of the milk of transgenic cows, goats, pigs or sheeps which are characterized by somatic or germ cells containing a nucleotide sequence encoding the protein of interest.

### EXAMPLE 19

[0692] Analysis of Secreted Proteins to Determine Whether they Bind to the Cell Surface

[0693] The proteins encoded by the cDNAs, or fragments thereof are cloned into expression vectors such as those described in the previous example. The proteins are purified by size, charge, immunochromatography or other techniques familiar to those skilled in the art. Following purification, the proteins are labeled using techniques known to those skilled in the art. The labeled proteins are incubated with cells or cell lines derived from a variety of organs or tissues to allow the proteins to bind to any receptor present on the cell surface. Following the incubation, the cells are washed to remove non-specifically bound protein. The labeled proteins are detected by autoradiography. Alternatively, unlabeled proteins may be incubated with the cells and detected with antibodies having a detectable label, such as a fluorescent molecule, attached thereto.

[0694] Specificity of cell surface binding may be analyzed by conducting a competition analysis in which various amounts of unlabeled protein are incubated along with the labeled protein. The amount of labeled protein bound to the cell surface decreases as the amount of competitive unlabeled protein increases. As a control, various amounts of an unlabeled protein unrelated to the labeled protein is included in some binding reactions. The amount of labeled protein bound to the cell surface does not decrease in binding reactions containing increasing amounts of unrelated unlabeled protein, indicating that the protein encoded by the cDNA binds specifically to the cell surface.

[0695] As discussed above, secreted proteins have been shown to have a number of important physiological effects and, consequently, represent a valuable therapeutic resource. The secreted proteins encoded by the cDNAs or fragments thereof made using any of the methods described therein may be evaluated to determine their physiological activities as described below.

### EXAMPLE 20

[0696] Assaying the Proteins Expressed from cDNAs or Fragments Thereof for Cytokine, Cell Proliferation or Cell Differentiation Activity

[0697] As discussed above, secreted proteins may act as cytokines or may affect cellular proliferation or differentiation. Many protein factors discovered to date, including all known cytokines, have exhibited activity in one or more factor dependent cell proliferation assays, and hence the assays serve as a convenient confirmation of cytokine activity. The activity of a protein of the present invention is evidenced by any one of a number of routine factor dependent cell proliferation assays for cell lines including, without limitation, 32D, DA2, DA1G, T10, B9, B9/11, BaF3, MC9/G, M+(preB M+), 2E8, RB5, DA1, 123, T1165, HT2, CTLL2, TF-1, Mo7c and CMK. The proteins encoded by the above cDNAs or fragments thereof may be evaluated for their ability to regulate T cell or thymocyte proliferation in assays such as those described above or in the following references, which are incorporated herein by reference: Current Protocols in Immunology, Ed. by J. E. Coligan et al., Greene Publishing Associates and Wiley-Interscience; Takai et al. J. Immunol. 137:3494-3500, 1986. Bertagnolli et al. J. Immunol. 145:1706-1712, 1990. Bertagnolli et al., Cellular Immunology 133:327-341, 1991. Bertagnolli, et al. J. Immunol. 149:3778-3783, 1992; Bowman et al., J. Immunol. 152:1756-1761, 1994.

[0698] In addition, numerous assays for cytokine production and/or the proliferation of spleen cells, lymph node cells and thymocytes are known. These include the techniques disclosed in Current Protocols in Immunology. J. E. Coligan et al. Eds., Vol 1 pp. 3.12.1-3.12.14 John Wiley and Sons, Toronto. 1994; and Schreiber, R. D. Current Protocols in Immunology, supra Vol 1 pp. 6.8.1-6.8.8, John Wiley and Sons, Toronto. 1994.

[0699] The proteins encoded by the cDNAs may also be assayed for the ability to regulate the proliferation and differentiation of hematopoietic or lymphopoietic cells. Many assays for such activity are familiar to those skilled in the art, including the assays in the following references, which are incorporated herein by reference: Bottomly, K., Davis, L. S. and Lipsky, P. E., Measurement of Human and Murine Interleukin 2 and Interleukin 4, Current Protocols in Immunology., J. E. Coligan et al. Eds. Vol 1 pp. 6.3.1-6.3.12, John Wiley and Sons, Toronto. 1991; deVries et al., J. Exp. Med. 173:1205-1211, 1991; Moreau et al., Nature 36:690-692, 1988; Greenberger et al., Proc. Natl. Acad. Sci. U.S.A. 80:2931-2938, 1983; Nordan, R., Measurement of Mouse and Human Interleukin 6 Current Protocols in Immunology. J. E. Coligan et al. Eds. Vol 1 pp. 6.6.1-6.6.5, John Wiley and Sons, Toronto. 1991; Smith et al., Proc. Natl. Acad. Sci. U.S.A. 83:1857-1861, 1986; Bennett, F., Giannotti, J., Clark, S. C. and Turner, K. J., Measurement of Human Interleukin 11 Current Protocols in Immunology. J. E. Coligan et al. Eds. Vol 1 pp. 6.15.1 John Wiley and Sons, Toronto. 1991; Ciarlefta, A., Giannotti, J., Clark, S. C. and Turner, K. J., measurement of Mouse and Human Interleukin 9 Current Protocols in Immunology. J. E. Coligan et al., Eds. Vol 1 pp. 6.13.1, John Wiley and Sons, Toronto. 1991.

[0700] The proteins encoded by the cDNAs may also be assayed for their ability to regulate T-cell responses to antigens. Many assays for such activity are familiar to those skilled in the art, including the assays described in the following references, which are incorporated herein by reference: Chapter 3 (In vitro Assays for Mouse Lymphocyte Function), Chapter 6 (Cytokines and Their Cellular Receptors) and Chapter 7, (Immunologic Studies in Humans) in Current Protocols in Immunology, J. E. Coligan et al. Eds. Greene Publishing Associates and Wiley-Interscienc; Weinberger et al., Proc. Natl. Acad. Sci. USA 77:6091-6095, 1980; Weinberger et al., Eur. J. Immun. 11:405-411, 1981; Takai et al., J. Immunol. 137:3494-3500, 1986; Takai et al., J. Immunol. 140:508-512, 1988.

[0701] Those proteins which exhibit cytokine, cell proliferation, or cell differentiation activity may then be formulated as pharmaceuticals and used to treat clinical conditions in which induction of cell proliferation or differentiation is beneficial. Alternatively, as described in more detail below, genes encoding these proteins or nucleic acids regulating the expression of these proteins may be introduced into appropriate host cells to increase or decrease the expression of the proteins as desired.

### EXAMPLE 21

[0702] Assaying the Proteins Expressed from cDNAs or Fragments Thereof for Activity as Immune System Regulators

[0703] The proteins encoded by the cDNAs may also be evaluated for their effects as immune regulators. For example, the proteins may be evaluated for their activity to influence thymocyte or splenocyte cytotoxicity. Numerous assays for such activity are familiar to those skilled in the art including the assays described in the following references, which are incorporated herein by reference: Chapter 3 (In vitro Assays for Mouse Lymphocyte Function 3.1-3.19) and Chapter 7 (Immunologic studies in Humans) in Current Protocols in Immunology, J. E. Coligan et al. Eds, Greene Publishing Associates and Wiley-Interscience; Herrmann et al., Proc. Natl. Acad. Sci. USA 78:2488-2492, 1981; Herrmann et al., J. Immunol. 128:1968-1974, 1982; Handa et al., J. Immunol. 135:1564-1572, 1985; Takai et al., J. Immunol. 137:3494-3500, 1986; Takai et al., J. Immunol. 140:508-512, 1988; Herrmann et al., Proc. Natl. Acad. Sci. USA 78:2488-2492, 1981; Herrmann et al., J. Immunol. 128:1968-1974, 1982; Handa et al., J. Immunol. 135:1564-1572, 1985; Takai et al., J. Immunol. 137:3494-3500, 1986; Bowman et al., J. Virology 61:1992-1998; akai et al., J. Immunol. 140:508-512, 1988; Bertagnolli et al., Cellular Immunology 133:327-341, 1991; Brown et al., J. Immunol. 153:3079-3092, 1994.

[0704] The proteins encoded by the cDNAs may also be evaluated for their effects on T-cell dependent immunoglobulin responses and isotype switching. Numerous assays for such activity are familiar to those skilled in the art, including the assays disclosed in the following eferences, which are incorporated herein by reference: Maliszewski, J. Immunol. 144:3028-3033, 1990; Mond, J. J. and Brunswick, M Assays for B Cell Function: In vitro Antibody Production, Vol 1 pp. 3.8.1-3.8.16 in Current Protocols in Immunology. J. E. Coligan et al Eds., John Wiley and Sons, Toronto. 1994.

[0705] The proteins encoded by the cDNAs may also be evaluated for their effect on immune effector cells, including their effect on Th1 cells and cytotoxic lymphocytes. Numerous assays for such activity are familiar to those skilled in the art, including the assays disclosed in the following references, which are incorporated herein by reference: Chapter 3 (In vitro Assays for Mouse Lymphocyte Function 3.1-3.19) and Chapter 7 (Immunologic Studies in Humans) in Current Protocols in Immunology, J. E. Coligan et al. Eds., Greene Publishing Associates and Wiley-Interscience; Takai et al., J. Immunol. 137:3494-3500, 1986; Takai et al.; J. Immunol. 140:508-512, 1988; Bertagnolli et al., J. Immunol. 149:3778-3783, 1992.

[0706] The proteins encoded by the cDNAs may also be evaluated for their effect on dendritic cell mediated activation of naive T-cells. Numerous assays for such activity are familiar to those skilled in the art, including the assays disclosed in the following references, which are incorporated herein by reference: Guery et al., J. Immunol. 134:536-544, 1995; Inaba et al., Journal of Experimental Medicine 173:549-559, 1991; Macatonia et al., Journal of Immunology 154:5071-5079, 1995; Porgador et al., Journal of Experimental Medicine 182:255-260, 1995; Nair et al., Journal of Virology 67:40624069, 1993; Huang et al., Science 264:961-965, 1994; Macatonia et al., Journal of Experimental Medicine 169:1255-1264, 1989; Bhardwaj et al., Journal of Clinical Investigation 94:797-807, 1994; and Inaba et al., Journal of Experimental Medicine 172:631-640, 1990.

[0707] The proteins encoded by the cDNAs may also be evaluated for their influence on the lifetime of lymphocytes. Numerous assays for such activity are familiar to those skilled in the art, including the assays disclosed in the following references, which are incorporated herein by reference: Darzynkiewicz et al., Cytometry 13:795-808, 1992; Gorczyca et al., Leukemia 7:659-670, 1993; Gorczyca et al., Cancer Research 53:1945-1951, 1993; Itoh et al., Cell 66:233-243, 1991; Zacharchuk, Journal oflmmunology 145:4037-4045, 1990; Zamai et al., Cytometry 14:891-897, 1993; Gorczyca et al., International Journal of Oncology 1:639-648, 1992.

[0708] Assays for proteins that influence early steps of T-cell commitment and evelopment include, without limitation, those described in: Antica et al., Blood 84:111-117, 1994; Fine et al., Cellular immunology 155:111-122, 1994; Galy et al., Blood 85:2770-2778, 1995; Toki et al., Proc. Nat. Acad. Sci. USA 88:7548-7551, 1991.

[0709] Those proteins which exhibit activity as immune system regulators activity may hen be formulated as pharmaceuticals and used to treat clinical conditions in which regulation of mmune activity is beneficial. For example, the protein may be useful in the treatment of various immune deficiencies and disorders (including severe combined immunodeficiency (SCID)), e.g., in egulating (up or down) growth and proliferation of T and/or B lymphocytes, as well as effecting the cytolytic activity of NK cells and other cell populations. These immune deficiencies may be genetic or be caused by viral (e.g., HIV) as well as bacterial or fungal infections, or may result from autoimmune disorders. More specifically, infectious diseases caused by viral, bacterial, fungal or other infection may be treatable using a protein of the present invention, including infections by HIV, hepatitis viruses, herpesviruses, mycobacteria, Leishmania spp., malaria spp. and various fungal infections such as candidiasis. Of course, in this regard, a protein of the present invention may also be useful where a boost to the immune system generally may be desirable, i.e., in the treatment of cancer.

[0710] Autoimmune disorders which may be treated using a protein of the present invention include, for example, connective tissue disease, multiple sclerosis, systemic lupus erythematosus, rheumatoid arthritis, autoimmune pulmonary inflammation, Guillain-Barre syndrome, autoimmune thyroiditis, insulin dependent diabetes mellitis, myasthenia gravis, graft-versus-host disease and autoimmune inflammatory eye disease. Such a protein of the present invention may also to be useful in the treatment of allergic reactions and conditions, such as asthma (particularly allergic asthma) or other respiratory problems. Other conditions, in which immune suppression is desired (including, for example, organ transplantation), may also be treatable using a protein of the present invention.

[0711] Using the proteins of the invention it may also be possible to regulate immune responses, in a number of ways. Down regulation may be in the form of inhibiting or blocking an immune response already in progress or may involve preventing the induction of an immune response. The functions of activated T-cells may be inhibited by suppressing T cell responses or by inducing specific tolerance in T cells, or both. Immunosuppression of T cell responses is generally an active, non-antigen-specific, process which requires continuous exposure of the T cells to the suppressive agent. Tolerance, which involves inducing non-responsiveness or anergy in T cells, is distinguishable from immunosuppression in that it is generally antigen-specific and persists after exposure to the tolerizing agent has ceased. Operationally, tolerance can be demonstrated by the lack of a T cell response upon reexposure to specific antigen in the absence of the tolerizing agent.

[0712] Down regulating or preventing one or more antigen functions (including without limitation B lymphocyte antigen functions (such as, for example, B7)), e.g., preventing high level lymphokine synthesis by activated T cells, will be useful in situations of tissue, skin and organ transplantation and in graft-versus-host disease (GVHD). For example, blockage of T cell function should result in reduced tissue destruction in tissue transplantation. Typically, in tissue transplants, rejection of the transplant is initiated through its recognition as foreign by T cells, followed by an immune reaction that destroys the transplant. The administration of a molecule which inhibits or blocks interaction of a B7 lymphocyte antigen with its natural ligand(s) on immune cells (such as a soluble, monomeric form of a peptide having B7-2 activity alone or in conjunction with a monomeric form of a peptide having an activity of another B lymphocyte antigen (e.g., B7-1, B7-3) or blocking antibody), prior to transplantation can lead to the binding of the molecule to the natural ligand(s) on the immune cells without transmitting the corresponding costimulatory signal. Blocking B lymphocyte antigen function in this matter prevents cytokine synthesis by immune cells, such as T cells, and thus acts as an immunosuppressant. Moreover, the lack of costimulation may also be sufficient to anergize the T cells, thereby inducing tolerance in a subject. Induction of long-term tolerance by B lymphocyte antigen-blocking reagents may avoid the necessity of repeated administration of these blocking reagents. To achieve sufficient immunosuppression or tolerance in a subject, it may also be necessary to block the function of a combination of B lymphocyte antigens.

[0713] The efficacy of particular blocking reagents in preventing organ transplant rejection or GVHD can be assessed using animal models that are predictive of efficacy in humans. Examples of appropriate systems which can be used include allogeneic cardiac grafts in rats and xenogeneic pancreatic islet cell grafts in mice, both of which have been used to examine the immunosuppressive effects of CTLA4Ig fusion proteins in vivo as described in Lenschow et al., Science 257:789-792 (1992) and Turka et al, Proc. Natl. Acad. Sci USA, 89:11102-11105 (1992). In addition, murine models of GVHD (see Paul ed., Fundamental Immunology, Raven Press, New York, 1989, pp. 846-847) can be used to determine the effect of blocking B lymphocyte antigen function in vivo on the development of that disease.

[0714] Blocking antigen function may also be therapeutically useful for treating autoimmune diseases. Many autoimmune disorders are the result of inappropriate activation of T cells that are reactive against self tissue and which promote the production of cytokines and autoantibodies involved in the pathology of the diseases. Preventing the activation of autoreactive T cells may reduce or eliminate disease symptoms. Administration of reagents which block costimulation of T cells by disrupting receptor ligand interactions of B lymphocyte antigens can be used to inhibit T cell activation and prevent production of autoantibodies or T cell-derived cytokines which may be involved in the disease process. Additionally, blocking reagents may induce antigen-specific tolerance of autoreactive T cells which could lead to long-term relief from the disease. The efficacy of blocking reagents in preventing or alleviating autoimmune disorders can be determined using a number of well-characterized animal models of human autoimmune diseases. Examples include murine experimental autoimmune encephalitis, systemic lupus erythmatosis in MRL/pr/pr mice or NZB hybrid mice, murine autoimmuno collagen arthritis, diabetes mellitus in OD mice and BB rats, and murine experimental myasthenia gravis (see Paul ed., Fundamental Immunology, Raven Press, New York, 1989, pp. 840-856).

[0715] Upregulation of an antigen function (preferably a B lymphocyte antigen function), as a means of up regulating immune responses, may also be useful in therapy. Upregulation of immune responses may be in the form of enhancing an existing immune response or eliciting an initial immune response. For example, enhancing an immune response through stimulating B lymphocyte antigen function may be useful in cases of viral infection. In addition, systemic viral diseases such as influenza, the common cold, and encephalitis might be alleviated by the administration of stimulatory form of B lymphocyte antigens systemically.

[0716] Alternatively, anti-viral immune responses may be enhanced in an infected patient by removing T cells from the patient, costimulating the T cells in vitro with viral antigen-pulsed APCs either expressing a peptide of the present invention or together with a stimulatory form of a soluble peptide of the present invention and reintroducing the in vitro activated T cells into the patient. The infected cells would now be capable of delivering a costimulatory signal to T cells in vivo, thereby activating the T cells.

[0717] In another application, up regulation or enhancement of antigen function (preferably B lymphocyte antigen function) may be useful in the induction of tumor immunity. Tumor cells (e.g., sarcoma, melanoma, lymphoma, leukemia, neuroblastoma, carcinoma) transfected with a nucleic acid encoding at least one peptide of the present invention can be administered to a subject to overcome tumor-specific tolerance in the subject. If desired, the tumor cell can be transfected to express a combination of peptides. For example, tumor cells obtained from a patient can be transfected ex vivo with an expression vector directing the expression of a peptide having B7-2-like activity alone, or in conjunction with a peptide having B7-1-like activity and/or B7-3-like activity. The transfected tumor cells are returned to the patient to result in expression of the peptides on the surface of the transfected cell. Alternatively, gene therapy techniques can be used to target a tumor cell for transfection in vivo.

[0718] The presence of the peptide of the present invention having the activity of a B lymphocyte antigen(s) on the surface of the tumor cell provides the necessary costimulation signal to T cells to induce a T cell mediated immune response against the transfected tumor cells. In addition, tumor cells which lack MHC class I or MHC class II molecules, or which fail to reexpress sufficient amounts of MHC class I or MHC class II molecules, can be transfected with nucleic acids encoding all or a fragment of (e.g., a cytoplasmic-domain truncated fragment) of an MHC class I α chain protein and P2 microglobulin protein or an MHC class II α chain protein and an MHC class II β chain protein to thereby express MHC class I or MHC class II proteins on the cell surface. Expression of the appropriate class II or class II MHC in conjunction with a peptide having the activity of a B lymphocyte antigen (e.g., B7-1, B7-2, B7-3) induces a T cell mediated immune response against the transfected tumor cell. Optionally, a gene encoding an antisense construct which blocks expression of an MHC class II associated protein, such as the invariant chain, can also be cotransfected with a DNA encoding a peptide having the activity of a B lymphocyte antigen to promote presentation of tumor associated antigens and induce tumor specific immunity. Thus, the induction of a T cell mediated immune response in a human subject may be sufficient to overcome tumor-specific tolerance in the subject. Alternatively, as described in more detail below, genes encoding these proteins or nucleic acids regulating the expression of these proteins may be introduced into appropriate host cells to increase or decrease the expression of the proteins as desired.

### EXAMPLE 22

[0719] Assaying the Proteins Expressed from cDNAs or Fragments thereof for Hematopoiesis Regulating Activity

[0720] The proteins encoded by the cDNAs or fragments thereof may also be evaluated for their hematopoiesis regulating activity. For example, the effect of the proteins on embryonic stem cell differentiation may be evaluated. Numerous assays for such activity are familiar to those skilled in the art, including the assays disclosed in the following references, which are incorporated herein by reference: Johansson et al. Cellular Biology 15:141-151, 1995; Keller et al., Molecular and Cellular Biology 13:473-486, 1993; McClanahan et al., Blood 81:2903-2915, 1993.

[0721] The proteins encoded by the cDNAs or fragments thereof may also be evaluated for their influence on the lifetime of stem cells and stem cell differentiation. Numerous assays for such activity are familiar to those skilled in the art, including the assays disclosed in the following references, which are incorporated herein by reference: Freshney, M. G. Methylcellulose Colony Forming Assays, in Culture of Hematopoietic Cells. R. I. Freshney, et al. Eds. pp. 265-268, Wiley-Liss, Inc., New York, N.Y. 1994; Hirayama et al., Proc. Natl. Acad. Sci. USA 89:5907-5911, 1992; McNiece, I. K. and Briddell, R. A. Primitive Hematopoietic Colony Forming Cells with High Proliferative Potential, in Culture of Hematopoietic Cells. R. I. Freshney, et al. eds. Vol pp. 23-39, Wiley-Liss, Inc., New York, N.Y. 1994; Neben et al., Experimental Hematology 22:353-359, 1994; Ploemacher, R. E. Cobblestone Area Forming Cell Assay, In Culture of Hematopoietic Cells. R. I. Freshney, et al. Eds. pp. 1-21, Wiley-Liss, Inc., New York, N.Y. 1994; Spooncer, E., Dexter, M. and Allen, T. Long Term Bone Marrow Cultures in the Presence of Stromal Cells, in Culture of Hematopoietic Cells. R. I. Freshney, et al. Eds. pp. 163-179, Wiley-Liss, Inc., New York, N.Y. 1994; and Sutherland, H. J. Long Term Culture Initiating Cell Assay, in Culture of Hematopoietic Cells. R. I. Freshney, et al. Eds. pp. 139-162, Wiley-Liss, Inc., New York, N.Y. 1994.

[0722] Those proteins which exhibit hematopoiesis regulatory activity may then be formulated as pharmaceuticals and used to treat clinical conditions in which regulation of hematopoeisis is beneficial. For example, a protein of the present invention may be useful in regulation of hematopoiesis and, consequently, in the treatment of myeloid or lymphoid cell deficiencies. Even marginal biological activity in support of colony forming cells or of factor-dependent cell lines indicates involvement in regulating hematopoiesis, e.g. in supporting the growth and proliferation of erythroid progenitor cells alone or in combination with other cytokines, thereby indicating utility, for example, in treating various anemias or for use in conjunction with irradiation/chemotherapy to stimulate the production of erythroid precursors and/or erythroid cells; in supporting the growth and proliferation of myeloid cells such as granulocytes and monocytes/macrophages (i.e., traditional CSF activity) useful, for example, in conjunction with chemotherapy to prevent or treat consequent myelo-suppression; in supporting the growth and proliferation of megakaryocytes and consequently of platelets thereby allowing prevention or treatment of various platelet disorders such as thrombocytopenia, and generally for use in place of or complimentary to platelet transfusions; and/or in supporting the growth and proliferation of hematopoietic stem cells which are capable of maturing to any and all of the above-mentioned hematopoietic cells and therefore find therapeutic utility in various stem cell disorders (such as those usually treated with transplantion, including, without limitation, aplastic anemia and paroxysmal nocturnal hemoglobinuria), as well as in repopulating the stem cell compartment post irradiation/chemotherapy, either in-vivo or ex-vivo (i.e., in conjunction with bone marrow transplantation or with peripheral progenitor cell transplantation (homologous or heterologous)) as normal cells or genetically manipulated for gene therapy. Alternatively, as described in more detail below, genes encoding these proteins or nucleic acids regulating the expression of these proteins may be introduced into appropriate host cells to increase or decrease the expression of the proteins as desired.

### EXAMPLE 23

[0723] Assaying the Proteins Expressed from cDNAs or Fragments thereof for Regulation of Tissue Growth

[0724] The proteins encoded by the cDNAs or fragments thereof may also be evaluated for their effect on tissue growth. Numerous assays for such activity are familiar to those skilled in the art, including the assays disclosed in International Patent Publication No. WO95/16035, International Patent Publication No. WO95/05846 and International Patent Publication No. WO91/07491, which are incorporated herein by reference.

[0725] Assays for wound healing activity include, without limitation, those described in: Winter, Epidermal Wound Healing, pps. 71-112 (Maibach, H1 and Rovee, D T, eds.), Year Book Medical Publishers, Inc., Chicago, as modified by Eaglstein and Mertz, J. Invest. Dermatol 71:382-84 (1978) which are incorporated herein by reference.

[0726] Those proteins which are involved in the regulation of tissue growth may then be formulated as pharmaceuticals and used to treat clinical conditions in which regulation of tissue growth is beneficial. For example, a protein of the present invention also may have utility in compositions used for bone, cartilage, tendon, ligament and/or nerve tissue growth or regeneration, as well as for wound healing and tissue repair and replacement, and in the treatment of burns, incisions and ulcers.

[0727] A protein of the present invention, which induces cartilage and/or bone growth in circumstances where bone is not normally formed, has application in the healing of bone fractures and cartilage damage or defects in humans and other animals. Such a preparation employing a protein of the invention may have prophylactic use in closed as well as open fracture reduction and also in the improved fixation of artificial joints. De novo bone formation induced by an osteogenic agent contributes to the repair of congenital, trauma induced, or oncologic resection induced craniofacial defects, and also is useful in cosmetic plastic surgery.

[0728] A protein of this invention may also be used in the treatment of periodontal disease, and in other tooth repair processes. Such agents may provide an environment to attract bone-forming cells, stimulate growth of bone-forming cells or induce differentiation of progenitors of bone-forming cells. A protein of the invention may also be useful in the treatment of osteoporosis or osteoarthritis, such as through stimulation of bone and/or cartilage repair or by blocking inflammation or processes of tissue destruction (collagenase activity, osteoclast activity, etc.) mediated by inflammatory processes.

[0729] Another category of tissue regeneration activity that may be attributable to the protein of the present invention is tendon/ligament formation. A protein of the present invention, which induces tendon/ligament-like tissue or other tissue formation in circumstances where such tissue is not normally formed, has application in the healing of tendon or ligament tears, deformities and other tendon or ligament defects in humans and other animals. Such a preparation employing a tendon/ligament-like tissue inducing protein may have prophylactic use in preventing damage to tendon or ligament tissue, as well as use in the improved fixation of tendon or ligament to bone or other tissues, and in repairing defects to tendon or ligament tissue. De novo tendon/ligament-like tissue formation induced by a composition of the present invention contributes to the repair of congenital, trauma induced, or other tendon or ligament defects of other origin, and is also useful in cosmetic plastic surgery for attachment or repair of tendons or ligaments. The compositions of the present invention may provide an environment to attract tendon- or ligament-forming cells, stimulate growth of tendon- or ligament-forming cells, induce differentiation of progenitors of tendon- or ligament-forming cells, or induce growth of tendon/ligament cells or progenitors ex vivo for return in vivo to effect tissue repair. The compositions of the invention may also be useful in the treatment of tendinitis, carpal tunnel syndrome and other tendon or ligament defects. The compositions may also include an appropriate matrix and/or sequestering agent as a carrier as is well known in the art.

[0730] The protein of the present invention may also be useful for proliferation of neural cells and for regeneration of nerve and brain tissue, i.e., for the treatment of central and peripheral nervous system diseases and neuropathies, as well as mechanical and traumatic disorders, which involve degeneration, death or trauma to neural cells or nerve tissue. More specifically, a protein may be used in the treatment of diseases of the peripheral nervous system, such as peripheral nerve injuries, peripheral neuropathy and localized neuropathies, and central nervous system diseases, such as Alzheimer's, Parkinson's disease, Huntington's disease, amyotrophic lateral sclerosis, and Shy-Drager syndrome. Further conditions which may be treated in accordance with the present invention include mechanical and traumatic disorders, such as spinal cord disorders, head trauma and cerebrovascular diseases such as stroke. Peripheral neuropathies resulting from chemotherapy or other medical therapies may also be treatable using a protein of the invention.

[0731] Proteins of the invention may also be useful to promote better or faster closure of non-healing wounds, including without limitation pressure ulcers, ulcers associated with vascular insufficiency, surgical and traumatic wounds, and the like.

[0732] It is expected that a protein of the present invention may also exhibit activity for generation or regeneration of other tissues, such as organs (including, for example, pancreas, liver, intestine, kidney, skin, endothelium) muscle (smooth, skeletal or cardiac) and vascular (including vascular endothelium) tissue, or for promoting the growth of cells comprising such tissues. Part of the desired effects may be by inhibition or modulation of fibrotic scarring to allow normal tissue to generate. A protein of the invention may also exhibit angiogenic activity.

[0733] A protein of the present invention may also be useful for gut protection or regeneration and treatment of lung or liver fibrosis, reperfusion injury in various tissues, and conditions resulting from systemic cytokinc damage.

[0734] A protein of the present invention may also be useful for promoting or inhibiting differentiation of tissues described above from precursor tissues or cells; or for inhibiting the growth of tissues described above.

[0735] Alternatively, as described in more detail below, genes encoding these proteins or nucleic acids regulating the expression of these proteins may be introduced into appropriate host cells to increase or decrease the expression of the proteins as desired.

### EXAMPLE 24

[0736] Assaying the Proteins Expressed from cDNAs or Fragments Thereof for Regulation of Reproductive Hormones or Cell Movement

[0737] The proteins encoded by the cDNAs or fragments thereof may also be evaluated for their ability to regulate reproductive hormones, such as follicle stimulating hormone. Numerous assays for such activity are familiar to those skilled in the art, including the assays disclosed in the following references, which are incorporated herein by reference: Vale et al., Endocrinology 91:562-572, 1972; Ling et al., Nature 321:779-782, 1986; Vale et al., Nature 321:776-779, 1986; Mason et al., Nature 318:659-663, 1985; Forage et al., Proc. Natl. Acad. Sci. USA 83:3091-3095, 1986. Chapter 6.12 (Measurement of Alpha and Beta Chemokines) Current Protocols in Immunology, J. E. Coligan et al. Eds. Greene Publishing Associates and Wiley-Intersciece; Taub et al. J. Clin. Invest. 95:1370-1376, 1995; Lind et al. APMIS 103:140-146, 1995; Muller et al. Eur. J. Immunol. 25:1744-1748; Gruber et al. J. of Immunol. 152:5860-5867, 1994; Johnston et al. J. of Immunol 153:1762-1768, 1994.

[0738] Those proteins which exhibit activity as reproductive hormones or regulators of cell movement may then be formulated as pharmaceuticals and used to treat clinical conditions in which regulation of reproductive hormones or cell movement are beneficial. For example, a protein of the present invention may also exhibit activin- or inhibin-related activities. Inhibins are characterized by their ability to inhibit the release of follicle stimulating hormone (FSH), while activins are characterized by their ability to stimulate the release of folic stimulating hormone (FSH). Thus, a protein of the present invention, alone or in heterodimers with a member of the inhibin α family, may be useful as a contraceptive based on the ability of inhibins to decrease fertility in female mammals and decrease spermatogenesis in male mammals. Administration of sufficient amounts of other inhibins can induce infertility in these mammals. Alternatively, the protein of the invention, as a homodimer or as a heterodimer with other protein subunits of the inhibin-B group, may be useful as a fertility inducing therapeutic, based upon the ability of activin molecules in stimulating FSH release from cells of the anterior pituitary. See, for example, U.S. Pat. No. 4,798,885, the disclosure of which is incorporated herein by reference. A protein of the invention may also be useful for advancement of the onset of fertility in sexually immature mammals, so as to increase the lifetime reproductive performance of domestic animals such as cows, sheep and pigs.

[0739] Alternatively, as described in more detail below, genes encoding these proteins or nucleic acids regulating the expression of these proteins may be introduced into appropriate host cells to increase or decrease the expression of the proteins as desired.

### EXAMPLE 25

[0740] Assaying the Proteins Expressed from cDNAs or Fragments thereof for Chemotactic/Chemokinetic Activity

[0741] The proteins encoded by the cDNAs or fragments thereof may also be evaluated for chemotactic/chemokinetic activity. For example, a protein of the present invention may have chemotactic or chemokinetic activity (e.g., act as a chemokine) for mammalian cells, including, for example, monocytes, fibroblasts, neutrophils, T-cells, mast cells, cosinophils, epithelial and/or endothelial cells. Chemotactic and chmokinetic proteins can be used to mobilize or attract a desired cell population to a desired site of action. Chemotactic or chemokinetic proteins provide particular advantages in treatment of wounds and other trauma to tissues, as well as in treatment of localized infections. For example, attraction of lymphocytes, monocytes or neutrophils to tumors or sites of infection may result in improved immune responses against the tumor or infecting agent.

[0742] A protein or peptide has chemotactic activity for a particular cell population if it can stimulate, directly or indirectly, the directed orientation or movement of such cell population. Preferably, the protein or peptide has the ability to directly stimulate directed movement of cells. Whether a particular protein has chemotactic activity for a population of cells can be readily determined by employing such protein or peptide in any known assay for cell chemotaxis.

[0743] The activity of a protein of the invention may, among other means, be measured by the following methods:

[0744] Assays for chemotactic activity (which will identify proteins that induce or prevent chemotaxis) consist of assays that measure the ability of a protein to induce the migration of cells across a membrane as well as the ability of a protein to induce the adhension of one cell population to another cell population. Suitable assays for movement and adhesion include, without limitation, those described in: Current Protocols in Immunology, Ed by J. E. Coligan, A. M. Kruisbeek, D. H. Margulies, E. M. Shevach, W. Strober, Pub. Greene Publishing Associates and Wiley-Interscience (Chapter 6.12, Measurement of alpha and beta Chemokincs 6.12.1-6.12.28; Taub et al. J. Clin. Invest. 95:1370-1376, 1995; Lind et al. APMIS 103:140-146, 1995; Mueller et al Eur. J. Immunol. 25:1744-1748; Gruber et al. J. of Immunol. 152:5860-5867, 1994; Johnston et al. J. of Immunol, 153:1762-1768, 1994.

### EXAMPLE 26

[0745] Assaying the Proteins Expressed from cDNAs or Fragments Thereof for Regulation of Blood Clotting

[0746] The proteins encoded by the cDNAs or fragments thereof may also be evaluated for their effects on blood clotting. Numerous assays for such activity are familiar to those skilled in the art, including the assays disclosed in the following references, which are incorporated herein by reference: Linet et al., J. Clin. Pharmacol. 26:131-140, 1986; Burdick et al., Thrombosis Res. 45:413-419, 1987; Humphrey et al., Fibrinolysis 5:71-79 (1991); Schaub, Prostaglandins 35:467-474, 1988.

[0747] Those proteins which are involved in the regulation of blood clotting may then be formulated as pharmaceuticals and used to treat clinical conditions in which regulation of blood clotting is beneficial. For example, a protein of the invention may also exhibit hemostatic or thrombolytic activity. As a result, such a protein is expected to be useful in treatment of various coagulations disorders (including hereditary disorders, such as hemophilias) or to enhance coagulation and other hemostatic events in treating wounds resulting from trauma, surgery or other causes. A protein of the invention may also be useful for dissolving or inhibiting formation of thromboses and for treatment and prevention of conditions resulting therefrom (such as, for example, infarction of cardiac and central nervous system vessels (e.g., stroke)). Alternatively, as described in more detail below, genes encoding these proteins or nucleic acids regulating the expression of these proteins may be introduced into appropriate host cells to increase or decrease the expression of the proteins as desired.

### EXAMPLE 27

[0748] Assaying the Proteins Expressed from cDNAs or Fragments Thereof for Involvement in Receptor/Ligand Interactions

[0749] The proteins encoded by the cDNAs or a fragment thereof may also be evaluated for their involvement in receptor/ligand interactions. Numerous assays for such involvement are familiar to those skilled in the art, including the assays disclosed in the following references, which are incorporated herein by reference: Chapter 7.28 (Measurement of Cellular Adhesion under Static Conditions 7.28.1-7.28.22) in Current Protocols in Immunology, J. E. Coligan et al. Eds. Greene Publishing Associates and Wiley-Interscience; Takai et al., Proc. Natl. Acad. Sci. USA 84:6864-6868, 1987; Bierer et al., J. Exp. Med. 168:1145-1156, 1988; Rosenstein et al., J. Exp. Med. 169:149-160, 1989; Stoltenborg et al., J. Immunol. Methods 175:59-68, 1994; Stitt et al., Cell 80:661-670, 1995; Gyuris et al., Cell 75:791-803, 1993.

[0750] For example, the proteins of the present invention may also demonstrate activity as receptors, receptor ligands or inhibitors or agonists of receptor/ligand interactions. Examples of such receptors and ligands include, without limitation, cytokine receptors and their ligands, receptor kinases and their ligands, receptor phosphatases and their ligands, receptors involved in cell-cell interactions and their ligands (including without limitation, cellular adhesion molecules (such as selecting, integrins and their ligands) and receptor/ligand pairs involved in antigen presentation, antigen recognition and development of cellular and humoral immune respones). Receptors and ligands are also useful for screening of potential peptide or small molecule inhibitors of the relevant receptor/ligand interaction. A protein of the present invention (including, without limitation, fragments of receptors and ligands) may themselves be useful as inhibitors of receptor/ligand interactions.

### EXAMPLE 28

[0751] Assaying the Proteins Expressed from cDNAs or Fragments Thereof for Anti-Inflammatory Activity

[0752] The proteins encoded by the cDNAs or a fragment thereof may also be evaluated for anti-inflammatory activity. The anti-inflammatory activity may be achieved by providing a stimulus to cells involved in the inflammatory response, by inhibiting or promoting cell-cell interactions (such as, for example, cell adhesion), by inhibiting or promoting chemotaxis of cells involved in the inflammatory process, inhibiting or promoting cell extravasation, or by stimulating or suppressing production of other factors which more directly inhibit or promote an inflammatory response. Proteins exhibiting such activities can be used to treat inflammatory conditions including chronic or acute conditions), including without limitation inflammation associated with infection (such as septic shock, sepsis or systemic inflammatory response syndrome (SIRS)), ischemia-reperfusioninury, endotoxin lethality, arthritis, complement-mediated hyperacute rejection, nephritis, cytokine or chemokine-induced lung injury, inflammatory bowel disease, Crohn's disease or resulting from over production of cytokines such as TNF or IL-1. Proteins of the invention may also be useful to treat anaphylaxis and hypersensitivity to an antigenic substance or material.

### EXAMPLE 29

[0753] Assaying the Proteins Expressed from cDNAs or Fragments Thereof for Tumor Inhibition Activity

[0754] The proteins encoded by the cDNAs or a fragment thereof may also be evaluated for tumor inhibition activity. In addition to the activities described above for immunological treatment or prevention of tumors, a protein of the invention may exhibit other anti-tumor activities. A protein may inhibit tumor growth directly or indirectly (such as, for example, via ADCC). A protein may exhibit its tumor inhibitory activity by acting on tumor tissue or tumor precursor tissue, by inhibiting formation of tissues necessary to support tumor growth (such as, for example, by inhibiting angiogenesis), by causing production of other factors, agents or cell types which inhibit tumor growth, or by suppressing, eliminating or inhibiting factors, agents or cell types which promote tumor growth.

[0755] A protein of the invention may also exhibit one or more of the following additional activities or effects: inhibiting the growth, infection or function of, or killing, infectious agents, including, without limitation, bacteria, viruses, fungi and other parasites; effecting (suppressing or enhancing) bodily characteristics, including, without limitation, height, weight, hair color, eye color, skin, fat to lean ratio or other tissue pigmentation, or organ or body part size or shape (such as, for example, breast augmentation or diminution, change in bone form or shape); effecting biorhythms or circadian cycles or rhythms; effecting the fertility of male or female subjects; effecting the metabolism, catabolism, anabolism, processing, utilization, storage or elimination of dietary fat, lipid, protein, carbohydrate, vitamins, minerals, cofactors or other nutritional factors or component(s); effecting behavioral characteristics, including, without limitation, appetite, libido, stress, cognition (including cognitive disorders), depression (including depressive disorders) and violent behaviors; providing analgesic effects or other pain reducing effects; promoting differentiation and growth of embryonic stem cells in lineages other than hematopoietic lineages; hormonal or endocrine activity; in the case of enzymes, correcting deficiencies of the enzyme and treating deficiency-related diseases; treatment of hyperproliferative disorders (such as, for example, psoriasis); immunoglobulin-like activity (such as, for example, the ability to bind antigens or complement); and the ability to act as an antigen in a vaccine composition to raise an immune response against such protein or another material or entity which is cross-reactive with such protein.

### EXAMPLE 30

[0756] Identification of Proteins which Interact with Polypeptides Encoded by cDNAs

[0757] Proteins which interact with the polypeptides encoded by cDNAs or fragments thereof, such as receptor proteins, may be identified using two hybrid systems such as the Matchmaker Two Hybrid System 2 (Catalog No. K1604-1, Clontech). As described in the manual accompanying the Matchmaker Two Hybrid System 2 (Catalog No. K1604-1, Clontech), which is incorporated herein by reference, the cDNAs or fragments thereof, are inserted into an expression vector such that they are in frame with DNA encoding the DNA binding domain of the yeast transcriptional activator GAL4. cDNAs in a cDNA library which encode proteins which might interact with the polypeptides encoded by the cDNAs or fragments thereof are inserted into a second expression vector such that they are in frame with DNA encoding the activation domain of GAL4. The two expression plasmids are transformed into yeast and the yeast are plated on selection medium which selects for expression of selectable markers on each of the expression vectors as well as GAL4 dependent expression of the HIS3 gene. Transformants capable of growing on medium lacking histidine are screened for GAL4 dependent lacZ expression. Those cells which are positive in both the histidine selection and the lacZ assay contain plasmids encoding proteins which interact with the polypeptide encoded by the cDNAs or fragments thereof.

[0758] Alternatively, the system described in Lustig et al., Methods in Enzymology 283: 83-99 (1997), the disclosure of which is incorporated herein by reference, may be used for identifying molecules which interact with the polypeptides encoded by cDNAs. In such systems, in vitro transcription reactions are performed on a pool of vectors containing cDNA inserts cloned downstream of a promoter which drives in vitro transcription. The resulting pools of mRNAs are introduced into Xenopus laevis oocytes. The oocytes are then assayed for a desired acitivity.

[0759] Alternatively, the pooled in vitro transcription products produced as described above may be translated in vitro. The pooled in vitro translation products can be assayed for a desired activity or for interaction with a known polypeptide.

[0760] Proteins or other molecules interacting with polypeptides encoded by cDNAs can be found by a variety of additional techniques. In one method, affinity columns containing the polypeptide encoded by the cDNA or a fragment thereof can be constructed. In some versions, of this method the affinity column contains chimeric proteins in which the protein encoded by the cDNA or a fragment thereof is fused to glutathione S-transferase. A mixture of cellular proteins or pool of expressed proteins as described above and is applied to the affinity column. Proteins interacting with the polypeptide attached to the column can then be isolated and analyzed on 2-D electrophoresis gel as described in Ramunsen et al. Electrophoresis, 18, 588-598 (1997), the disclosure of which is incorporated herein by reference. Alternatively, the proteins retained on the affinity column can be purified by electrophoresis based methods and sequenced. The same method can be used to isolate antibodies, to screen phage display products, or to screen phage display human antibodies.

[0761] Proteins interacting with polypeptides encoded by cDNAs or fragments thereof can also be screened by using an Optical Biosensor as described in Edwards & Leatherbarrow, Analytical Biochemistry, 246, 1-6 (1997), the disclosure of which is incorporated herein by reference. The main advantage of the method is that it allows the determination of the association rate between the protein and other interacting molecules. Thus, it is possible to specifically select interacting molecules with a high or low association rate. Typically a target molecule is linked to the sensor surface (through a carboxymethl dextran matrix) and a sample of test molecules is placed in contact with the target molecules. The binding of a test molecule to the target molecule causes a change in the refractive index and/or thickness. This change is detected by the Biosensor provided it occurs in the evanescent field (which extend a few hundred manometers from the sensor surface). In these screening assays, the target molecule can be one of the polypeptides encoded by cDNAs or a fragment thereof and the test sample can be a collection of proteins extracted from tissues or cells, a pool of expressed proteins, combinatorial peptide and/or chemical libraries, or phage displayed peptides. The tissues or cells from which the test proteins are extracted can originate from any species.

[0762] In other methods, a target protein is immobilized and the test population is a collection of unique polypeptides encoded by the cDNAs or fragments thereof.

[0763] To study the interaction of the proteins encoded by the cDNAs or fragments thereof with drugs, the microdialysis coupled to HPLC method described by Wang et al., Chromatographia, 44, 205-208(1997) or the affinity capillary electrophoresis method described by Busch et al, J. Chromatogr. 777:311-328 (1997), the disclosures of which are incorporated herein by reference can be used.

[0764] The system described in U.S. Pat. No. 5,654,150, the disclosure of which is incorporated herein by reference, may also be used to identify molecules which interact with the polypeptides encoded by the cDNAs. In this system, pools of cDNAs are transcribed and translated in vitro and the reaction products are assayed for interaction with a known polypeptide or antibody.

[0765] It will be appreciated by those skilled in the art that the proteins expressed from the cDNAs or fragments may be assayed for numerous activities in addition to those specifically enumerated above. For example, the expressed proteins may be evaluated for applications involving control and regulation of inflammation, tumor proliferation or metastasis, infection, or other clinical conditions. In addition, the proteins expressed from the cDNAs or fragments thereof may be useful as nutritional agents or cosmetic agents.

[0766] The proteins expressed from the cDNAs or fragments thereof may be used to generate antibodies capable of specifically binding to the expressed protein or fragments thereof as described below. The antibodies may capable of binding a full length protein encoded by one of the sequences of SEQ ID NOs. 1-405, a mature protein encoded by one of the sequences of SEQ ID NOs. 1-405, or a signal peptide encoded by one of the sequences of SEQ ID Nos. 1-405. Alternatively, the antibodies may be capable of binding fragments of the proteins expressed from the cDNAs which comprise at least 10 amino acids of the sequences of SEQ ID NOs: 406-810. In some embodiments, the antibodies may be capable of binding fragments of the proteins expressed from the cDNAs which comprise at least 15 amino acids of the sequences of SEQ ID NOs: 406-810. In other embodiments, the antibodies may be capable of binding fragments of the proteins expressed from the cDNAs which comprise at least 25 amino acids of the sequences of SEQ ID NOs: 406-810. In further embodiments, the antibodies may be capable of binding fragments of the proteins expressed from the cDNAs which comprise at least 40 amino acids of the sequences of SEQ ID NOs: 406-810.

### EXAMPLE 31

[0767] Epitopes and Antibody Fusions

[0768] A preferred embodiment of the present invention is directed to eiptope-bearing polypeptides and epitope-bearing polypeptide fragments. These epitopes may be “antigenic epitopes” or both an “antigenic epitope” and an “immunogenic epitope”. An “immunogenic epitope” is defined as a part of a protein that elicits an antibody response in vivo when the polypeptide is the immunogen. On the other hand, a region of polypeptide to which an antibody binds is defined as an “antigenic determinant” or “antigenic epitope.” The number of immunogenic epitopes of a protein generally is less than the number of antigenic epitopes (See, e.g., Geysen, et al., 1983). It is particularly noted that although a particular epitope may not be immunogenic, it is nonetheless useful since antibodies can be made to both immunogenic and antigenic epitopes.

[0769] An epitope can comprise as few as 3 amino acids in a spatial conformation, which is unique to the epitope. Generally an epitope consists of at least 6 such amino acids, and more often at least 8-10 such amino acids. In preferred embodiment, antigenic epitopes comprise a number of amino acids that is any integer between 3 and 50. Fragments which function as epitopes may be produced by any conventional means (See, e.g., Houghten, R. A., 1985), also, further described in U.S. Pat. No. 4,631,211. Methods for determining the amino acids which make up an epitope include x-ray crystallography, 2-dimensional nuclear magnetic resonance, and epitope mapping, e.g., the Pepscan method described by Mario H. Geysen et al. (1984); PCT Publication No. WO 84/03564; and PCT Publication No. WO 84/03506. Epitopes may also be delineated using an algorithm, such as the algorithm of Jameson and Wolf, (Jameson and Wolf, Comp. Appl. Biosci. 4:181-186 (1988). The Jameson-Wolf antigenic analysis, for example, may be performed using the computer program PROTEAN, using default parameters (Version 4.0 Windows, DNASTAR, Inc., 1228 South Park Street Madison, Wis.

[0770] Table X lists antigenic peaks of predicted antigenic epitopes identified by the Jameson-Wolf algorithm. For each polypeptide referred to by its sequence identification number in the first column, the second colmun gives a list of antigenic peaks separated by a coma. Preferred antigenic epitopes of the present invention comprise an additional 6 amino acid residues both N-terminal and C-terminal to the positions listed in the Table. For example, for SEQ ID NO:406, the first preferred immunogenic epitope comprises amino acid residues 52 to 64. Note that for the purposes of this Table, position 1 is the N-terminal methionine residue, i.e., the leader sequence is not numbered negatively.

[0771] It is pointed out that the immunogenic epitope list describe only amino acid residues comprising epitopes predicted to have the highest degree of immunogenicity by a particular algorithm. Polypeptides of the present invention that are not specifically described as immunogenic are not considered non-antigenic. This is because they may still be antigenic in vivo but merely not recognized as such by the particular algorithm used. Alternatively, the polypeptides are probably antigenic in vitro using methods such a phage display. In fact, all fragments of the polypeptides of the present invention, at least 6 amino acids residues in length, are included in the present invention as being useful as antigenic epitope. Moreover, listed in Table IX are only the critical residues of the epitopes determined by the Jameson-Wolf analysis. Thus, additional flanking residues on either the N-terminal, C-terminal, or both N- and C-terminal ends may be added to the sequences listed to generate an epitope-bearing portion at least 6 residues in length. Amino acid residues comprising other immunogenic epitopes may be determined by algorithms similar to the Jameson-Wolf analysis or by in vivo testing for an antigenic response using the methods described herein or those known in the art.

[0772] The epitope-bearing fragments of the present invention preferably comprises 6 to 50 amino acids (i.e. any integer between 6 and 50, inclusive) of a polypeptide of the present invention. Also, included in the present invention are antigenic fragments between the integers of 6 and the full length polypeptide sequence of the sequence listing. All combinations of sequences between the integers of 6 and the full-length sequence of a polypeptide are included. The epitope-bearing fragments may be specified by either the number of contiguous amino acid residues (as a sub-genus) or by specific N-terminal and C-terminal positions (as species) as described above for the polypeptide fragments of the present invention. Any number of epitope-bearing fragments of the present invention may also be excluded in the same manner.

[0773] Antigenic epitopes are useful, for example, to raise antibodies, including monoclonal antibodies that specifically bind the epitope (See, Wilson et al., 1984; and Sutcliffe, J. G. et al., 1983). The antibodies are then used in various techniques such as diagnostic and tissue/cell identification techniques, as described herein, and in purification methods.

[0774] Similarly, immunogenic epitopes can be used to induce antibodies according to methods well known in the art (See, Sutcliffe et al., supra; Wilson et al., supra; Chow, M. et al.; (1985) and Bittle, F. J. et al., (1985)). The immunogenic epitopes may be presented together with a carrier protein, such as an albumin, to an animal system (such as rabbit or mouse) or, if it is long enough (at least about 25 amino acids), without a carrier. However, immunogenic epitopes comprising as few as 8 to 10 amino acids have been shown to be sufficient to raise antibodies capable of binding to, at the very least, linear epitopes in a denatured polypeptide (e.g., in Western blotting.).

[0775] Epitope-bearing polypeptides of the present invention are used to induce antibodies according to methods well known in the art including, but not limited to, in vivo immunization, in vitro immunization, and phage display methods (See, e.g., Sutcliffe, et al., supra; Wilson, et al., supra, and Bittle, et al., 1985). If in vivo immunization is used, animals may be immunized with free peptide; however, anti-peptide antibody titer may be boosted by coupling of the peptide to a macromolecular carrier, such as keyhole limpet hemacyanin (KLH) or tetanus toxoid. For instance, peptides containing cysteine residues may be coupled to a carrier using a linker such as maleimidobenzoyl-N-hydroxysuccinimide ester (MBS), while other peptides may be coupled to carriers using a more general linking agent such as glutaraldehyde. Animals such as rabbits, rats and mice are immunized with either free or carrier-coupled peptides, for instance, by intraperitoneal and/or intradermal injection of emulsions containing about 100 μgs of peptide or carrier protein and Freund's adjuvant. Several booster injections may be needed, for instance, at intervals of about two weeks, to provide a useful titer of anti-peptide antibody, which can be detected, for example, by ELISA assay using free peptide adsorbed to a solid surface. The titer of anti-peptide antibodies in serum from an immunized animal may be increased by selection of anti-peptide antibodies, for instance, by adsorption to the peptide on a solid support and elution of the selected antibodies according to methods well known in the art.

[0776] As one of skill in the art will appreciate, and discussed above, the polypeptides of the present invention comprising an immunogenic or antigenic epitope can be fused to heterologous polypeptide sequences. For example, the polypeptides of the present invention may be fused with the constant domain of immunoglobulins (IgA, IgE, IgG, IgM), or portions thereof (CH1, CH2, CH3, any combination thereof including both entire domains and portions thereof) resulting in chimeric polypeptides. These fusion proteins facilitate purification, and show an increased half-life in vivo. This has been shown, e.g., for chimeric proteins consisting of the first two domains of the human CD4-polypeptide and various domains of the constant regions of the heavy or light chains of mammalian immunoglobulins (See, e.g., EPA 0,394,827; and Traunecker et al., 1988). Fusion proteins that have a disulfide-linked dimeric structure due to the IgG portion can also be more efficient in binding and neutralizing other molecules than monomeric polypeptides or fragments thereof alone (See, e.g., Fountoulakis et al., 1995). Nucleic acids encoding the above epitopes can also be recombined with a gene of interest as an epitope tag to aid in detection and purification of the expressed polypeptide.

[0777] Additonal fusion proteins of the invention may be generated through the techniques of gene-shuffling, motif-shuffling, exon-shuffling, or codon-shuffling (collectively referred to as “DNA shuffling”). DNA shuffling may be employed to modulate the activities of polypeptides of the present invention thereby effectively generating agonists and antagonists of the polypeptides. See, for example, U.S. Pat. Nos. 5,605,793; 5,811,238; 5,834,252; 5,837,458; and Patten, P. A., et al., (1997); Harayama, S., (1998); Hansson, L. O., et al (1999); and Lorenzo, M. M. and Blasco, R., (1998). In one embodiment, one or more components, motifs, sections, parts, domains, fragments, etc., of coding polynucleotides of the invention, or the polypeptides encoded thereby may be recombined with one or more components, motifs, sections, parts, domains, fragments, etc. of one or more heterologous molecules.

[0778] Antibodies:

[0779] The present invention further relates to antibodies and T-cell antigen receptors (TCR), which specifically bind the polypeptides, and more specifically, the epitopes of the polyepeptides of the present invention. The antibodies of the present invention include IgG (including IgG1, IgG2, IgG3, and IgG4), IgA (including IgA1 and IgA2), IgD, IgE, or IgM, and IgY. As used herein, the term “antibody” (Ab) is meant to include whole antibodies, including single-chain whole antibodies, and antigen binding fragments thereof. In a preferred embodiment the antibodies are human antigen binding antibody fragments of the present invention include, but are not limited to, Fab, Fab′F(ab)2 and F(ab′)2, Fd, single-chain Fvs (scFv), single-chain antibodies, disulfide-linked Fvs (sdFv) and fragments comprising either a V_{L} or V_{H} domain. The antibodies may be from any animal origin including birds and mammals. Preferably, the antibodies are human, murine, rabbit, goat, guinea pig, camel, horse, or chicken.

[0780] Antigen-binding antibody fragments, including single-chain antibodies, may comprise the variable region(s) alone or in combination with the entire or partial of the following: hinge region, CH1, CH2, and CH3 domains. Also included in the invention are any combinations of variable region(s) and hinge region, CH1, CH2, and CH3 domains. The present invention further includes chimeric, humanized, and human monoclonal and polyclonal antibodies, which specifically bind the polypeptides of the present invention. The present invention further includes antibodies that are anti-idiotypic to the antibodies of the present invention.

[0781] The antibodies of the present invention may be monospecific, bispecific, and trispecific or have greater multispecificity. Multispecific antibodies may be specific for different epitopes of a polypeptide of the present invention or may be specific for both a polypeptide of the present invention as well as for heterologous compositions, such as a heterologous polypeptide or solid support material. See, e.g., WO 93/17715; WO 92/08802; WO 91/00360; WO 92/05793; Tutt, A. et al. (1991); U.S. Pat. Nos. 5,573,920, 4,474,893, 5,601,819, 4,714,681, 4,925,648; Kostelny, S. A. et al. (1992).

[0782] Antibodies of the present invention may be described or specified in terms of the epitope(s) or epitope-bearing portion(s) of a polypeptide of the present invention, which are recognized or specifically bound by the antibody. In the case of proteins of the present invention secreted proteins, the antibodies may specifically bind a full-length protein encoded by a nucleic acid of the present invention, a mature protein (i.e., the protein generated by cleavage of the signal peptide) encoded by a nucleic acid of the present invention, a signal peptide encoded by a nucleic acid of the present invention, or any other polypeptide of the present invention. Therefore, the epitope(s) or epitope bearing polypeptide portion(s) may be specified as described herein, e.g., by N-terminal and C-terminal positions, by size in contiguous amino acid residues, or otherwise described herein (including the squence listing). Antibodies which specifically bind any epitope or polypeptide of the present invention may also be excluded as individual species. Therefore, the present invention includes antibodies that specifically bind specified polypeptides of the present invention, and allows for the exclusion of the same.

[0783] Antibodies of the present invention may also be described or specified in terms of their cross-reactivity. Antibodies that do not specifically bind any other analog, ortholog, or homolog of the polypeptides of the present invention are included. Antibodies that do not bind polypeptides with less than 95%, less than 90%, less than 85%, less than 80%, less than 75%, less than 70%, less than 65%, less than 60%, less than 55%, and less than 50% identity (as calculated using methods known in the art and described herein, eg., using FASTDB and the parameters set forth herein) to a polypeptide of the present invention are also included in the present invention. Further included in the present invention are antibodies, which only bind polypeptides encoded by polynucleotides, which hybridize to a polynucleotide of the present invention under stringent hybridization conditions (as described herein). Antibodies of the present invention may also be described or specified in terms of their binding affinity. Preferred binding affinities include those with a dissociation constant or Kd less than 5×10⁻⁶ M, 10⁻⁶ M, 5×10⁻⁷ M, 10⁻⁷ M, 5×10⁻⁸ M, 10⁻⁸ M, 5×10⁻⁹ M, 10⁻⁹ M, 5×10⁻¹⁰ M, 10⁻¹⁰ M, 5×10⁻¹¹ M, 10⁻¹¹ M, 5×10⁻¹² M, 10⁻¹² M, 5×10⁻¹³ M, 10⁻¹³ M, 5×10⁻¹⁴ M, 10⁻¹⁴ M, 5×10¹⁵ M, and 10⁻¹⁵ M.

[0784] Antibodies of the present invention have uses that include, but are not limited to, methods known in the art to purify, detect, and target the polypeptides of the present invention including both in vitro and in vivo diagnostic and therapeutic methods. For example, the antibodies have use in immunoassays for qualitatively and quantitatively measuring levels of the polypeptides of the present invention in biological samples (See, e.g., Harlow et al., 1988).

[0785] The antibodies of the present invention may be used either alone or in combination with other compositions. The antibodies may further be recombinantly fused to a heterologous polypeptide at the N- or C-terminus or chemically conjugated (including covalent and non-covalent conjugations) to polypeptides or other compositions. For example, antibodies of the resent invention may be recombinantly fused or conjugated to molecules useful as labels in detection assays and effector molecules such as heterologous polypeptides, drugs, or toxins. See, e.g., WO 92/08495; WO 91/14438; WO 89/12624; U.S. Pat. No. 5,314,995; and EP 0 396 387.

[0786] The antibodies of the present invention may be prepared by any suitable method known in the art. For example, a polypeptide of the present invention or an antigenic fragment thereof can be administered to an animal in order to induce the production of sera containing polyclonal antibodies. The term “monoclonal antibody” is not limited to antibodies produced through hybridoma technology. The term “antibody” refers to a polypeptide or group of polypeptides which are comprised of at least one binding domain, where a binding domain is formed from the folding of variable domains of an antibody molecule to form three-dimensional binding spaces with an internal surface shape and charge distribution complementary to the features of an antigenic determinant of an antigen, which allows an immunological reaction with the antigen. The term “monoclonal antibody” refers to an antibody that is derived from a single clone, including eukaryotic, prokaryotic, or phage clone, and not the method by which it is produced. Monoclonal antibodies can be prepared using a wide variety of techniques known in the art including the use of hybridoma, recombinant, and phage display technology.

[0787] Hybridoma techniques include those known in the art (See, e.g., Harlow et al. 1988); Hammerling, et al, 1981). (Said references incorporated by reference in their entireties). Fab and F(ab′)2 fragments may be produced, for example, from hybridoma-produced antibodies by proteolytic cleavage, using enzymes such as papain (to produce Fab fragments) or pepsin (to produce F(ab′)2 fragments).

[0788] Alternatively, antibodies of the present invention can be produced through the application of recombinant DNA technology or through synthetic chemistry using methods known in the art. For example, the antibodies of the present invention can be prepared using various phage display methods known in the art. In phage display methods, functional antibody domains are displayed on the surface of a phage particle, which carries polynucleotide sequences encoding them. Phage with a desired binding property are selected from a repertoire or combinatorial antibody library (e.g. human or murine) by selecting directly with antigen, typically antigen bound or captured to a solid surface or bead. Phage used in these methods are typically filamentous phage including fd and M13 with Fab, Fv or disulfide stabilized Fv antibody domains recombinantly fused to either the phage gene III or gene VIII protein. Examples of phage display methods that can be used to make the antibodies of the present invention include those disclosed in Brinkman U. et al. (1995); Ames, R. S. et al. (1995); Kettleborough, C. A. et al. (1994); Persic, L. et al. (1997); Burton, D. R. et al. (1994); PCT/GB91/01134; WO 90/02809; WO 91/10737; WO 92/01047; WO 92/18619; WO 93/11236; WO 95/15982; WO 95/20401; and U.S. Pat. Nos. 5,698,426, 5,223,409, 5,403,484, 5,580,717, 5,427,908, 5,750,753, 5,821,047, 5,571,698, 5,427,908, 5,516,637, 5,780,225, 5,658,727 and 5,733,743.

[0789] As described in the above references, after phage selection, the antibody coding regions from the phage can be isolated and used to generate whole antibodies, including human antibodies, or any other desired antigen binding fragment, and expressed in any desired host including mammalian cells, insect cells, plant cells, yeast, and bacteria. For example, techniques to recombinantly produce Fab, Fab′ F(ab)2 and F(ab′)2 fragments can also be employed using methods known in the art such as those disclosed in WO 92/22324; Mullinax, R. L. et al. (1992); and Sawai, H. et al. (1995); and Better, M. et al. (1988).

[0790] Examples of techniques which can be used to produce single-chain Fvs and antibodies include those described in U.S. Pat. Nos. 4,946,778 and 5,258,498; Huston et al. (1991); Shu, L. et al. (1993); and Skerra, A. et al. (1988). For some uses, including in vivo use of antibodies in humans and in vitro detection assays, it may be preferable to use chimeric, humanized, or human antibodies. Methods for producing chimeric antibodies are known in the art. See e.g., Morrison, (1985); Oi et al., (1986); Gillies, S. D. et al. (1989); and U.S. Pat. No. 5,807,715. Antibodies can be humanized using a variety of techniques including CDR-grafting (EP 0 239 400; WO 91/09967; U.S. Pat. No. 5,530,101; and 5,585,089), veneering or resurfacing, (EP 0 592 106; EP 0 519 596; Padlan E. A., 1991; Studnicka G. M. et al., 1994; Roguska M. A. et al., 1994), and chain shuffling (U.S. Pat. No. 5,565,332). Human antibodies can be made by a variety of methods known in the art including phage display methods described above. See also, U.S. Pat. Nos. 4,444,887, 4,716,111, 5,545,806, and 5,814,318; WO 98/46645; WO 98/50433; WO 98/24893; WO 96/34096; WO 96/33735; and WO 91/10741.

[0791] Further included in the present invention are antibodies recombinantly fused or chemically conjugated (including both covalently and non-covalently conjugations) to a polypeptide of the present invention. The antibodies may be specific for antigens other than polypeptides of the present invention. For example, antibodies may be used to target the polypeptides of the present invention to particular cell types, either in vitro or in vivo, by fusing or conjugating the polypeptides of the present invention to antibodies specific for particular cell surface receptors. Antibodies fused or conjugated to the polypeptides of the present invention may also be used in in vitro immunoassays and purification methods using methods known in the art (See e.g., Harbor et al. supra; WO 93/21232; EP 0 439 095; Naramura, M. et al. 1994; U.S. Pat. No. 5,474,981; Gillies, S. O. et al., 1992; Fell, H. P. et al., 1991).

[0792] The present invention further includes compositions comprising the polypeptides of the present invention fused or conjugated to antibody domains other than the variable regions. For example, the polypeptides of the present invention may be fused or conjugated to an antibody Fc region, or portion thereof. The antibody portion fused to a polypeptide of the present invention may comprise the hinge region, CH1 domain, CH2 domain, and CH3 domain or any combination of whole domains or portions thereof. The polypeptides of the present invention may be fused or conjugated to the above antibody portions to increase the in vivo half-life of the polypeptides or for use in immunoassays using methods known in the art. The polypeptides may also be fused or conjugated to the above antibody portions to form multimers. For example, Fc portions fused to the polypeptides of the present invention can form dimers through disulfide bonding between the Fc portions. Higher multimeric forms can be made by fusing the polypeptides to portions of IgA and IgM. Methods for fusing or conjugating the polypeptides of the present invention to antibody portions are known in the art. See e.g., U.S. Pat. Nos. 5,336,603, 5,622,929, 5,359,046, 5,349,053, 5,447,851, 5,112,946; EP 0 307 434, EP 0 367 166; WO 96/04388, WO 91/06570; Ashkenazi, A. et al. (1991); Zheng, X.X. et al. (1995); and Vil, H. et al. (1992).

[0793] The invention further relates to antibodies that act as agonists or antagonists of the polypeptides of the present invention. For example, the present invention includes antibodies that disrupt the receptor/ligand interactions with the polypeptides of the invention either partially or fully. Included are both receptor-specific antibodies and ligand-specific antibodies. Included are receptor-specific antibodies, which do not prevent ligand binding but prevent receptor activation. Receptor activation (i.e., signaling) may be determined by techniques described herein or otherwise known in the art. Also include are receptor-specific antibodies which both prevent ligand binding and receptor activation. Likewise, included are neutralizing antibodies that bind the ligand and prevent binding of the ligand to the receptor, as well as antibodies that bind the ligand, thereby preventing receptor activation, but do not prevent the ligand from binding the receptor. Further included are antibodies that activate the receptor. These antibodies may act as agonists for either all or less than all of the biological activities affected by ligand-mediated receptor activation. The antibodies may be specified as agonists or antagonists for biological activities comprising specific activities disclosed herein. The above antibody agonists can be made using methods known in the art. See e.g., WO 96/40281; U.S. Pat. No. 5,811,097; Deng, B. et al. (1998); Chen, Z. et al. (1998); Harrop, J. A. et al. (1998); Zhu, Z. et al. (1998); Yoon, D. Y. et al. (1998); Prat, M. et al. (1998) J.; Pitard, V. et al. (1997); Liautard, J. et al. (1997); Carlson, N. G. et al. (1997) J.; Taryman, R. E. et al. (1995); Muller, Y. A. et al. (1998); Bartunek, P. et al. (1996).

[0794] As discussed above, antibodies of the polypeptides of the invention can, in turn, be utilized to generate anti-idiotypic antibodies that “mimic” polypeptides of the invention using techniques well known to those skilled in the art (See, e.g. Greenspan and Bona (1989); and Nissinoff (1991). For example, antibodies which bind to and competitively inhibit polypeptide multimerization or binding of a polypeptide of the invention to ligand can be used to generate anti-idiotypes that “mimic” the polypeptide multimerization or binding domain and, as a consequence, bind to and neutralize polypeptide or its ligand. Such neutralization anti-idiotypic antibodies can be used to bind a polypeptide of the invention or to bind its ligands/receptors, and therby block its biological activity,

[0795] The invention also concerns a purified or isolated antibody capable of specifically binding to a mutated full length or mature polypeptide of the present invention or to a fragment or variant thereof comprising an epitope of the mutated polypeptide. In another preferred embodiment, the present invention concerns an antibody capable of binding to a polypeptide comprising at least 10 consecutive amino acids of a polypeptide of the present invention and including at least one of the amino acids which can be encoded by the trait causing mutations.

[0796] Non-human animals or mammals, whether wild-type or transgenic, which express a different species of a polypeptide of the present invention than the one to which antibody binding is desired, and animals which do not express a polypeptide of the present invention (i.e. a knock out animal) are particularly useful for preparing antibodies. Gene knock out animals will recognize all or most of the exposed regions of a polypeptide of the present invention as foreign antigens, and therefore produce antibodies with a wider array of epitopes. Moreover, smaller polypeptides with only 10 to 30 amino acids may be useful in obtaining specific binding to any one of the polypeptides of the present invention. In addition, the humoral immune system of animals which produce a species of a polypeptide of the present invention that resembles the antigenic sequence will preferentially recognize the differences between the animal's native polypeptide species and the antigen sequence, and produce antibodies to these unique sites in the antigen sequence. Such a technique will be particularly useful in obtaining antibodies that specifically bind to any one of the polypeptides of the present invention.

[0797] Antibody preparations prepared according to either protocol are useful in quantitative immunoassays which determine concentrations of antigen-bearing substances in biological samples; they are also used semi-quantitatively or qualitatively to identify the presence of antigen in a biological sample. The antibodies may also be used in therapeutic compositions for killing cells expressing the protein or reducing the levels of the protein in the body.

[0798] The antibodies of the invention may be labeled by any one of the radioactive, fluorescent or enzymatic labels known in the art.

[0799] Consequently, the invention is also directed to a method for detecting specifically the presence of a polypeptide of the present invention according to the invention in a biological sample, said method comprising the following steps:

[0800] a) bringing into contact the biological sample with a polyclonal or monoclonal antibody that specifically binds a polypeptide of the present invention; and

[0801] b) detecting the antigen-antibody complex formed.

[0802] The invention also concerns a diagnostic kit for detecting in vitro the presence of a polypeptide of the present invention in a biological sample, wherein said kit comprises:

[0803] a) a polyclonal or monoclonal antibody that specifically binds a polypeptide of the present invention, optionally labeled;

[0804] b) a reagent allowing the detection of the antigen-antibody complexes formed, said reagent carrying optionally a label, or being able to be recognized itself by a labeled reagent, more particularly in the case when the above-mentioned monoclonal or polyclonal antibody is not labeled by itself.

[0805] A. Monoclonal Antibody Production by Hybridoma Fusion

[0806] Monoclonal antibody to epitopes of any of the peptides identified and isolated as described can be prepared from murine hybridomas according to the classical method of Kohler, G. and Milstein, C., Nature 256:495 (1975) or derivative methods thereof. Briefly, a mouse is repetitively inoculated with a few micrograms of the selected protein or peptides derived therefrom over a period of a few weeks. The mouse is then sacrificed, and the antibody producing cells of the spleen isolated. The spleen cells are fused by means of polyethylene glycol with mouse myeloma cells, and the excess unfused cells destroyed by growth of the system on selective media comprising aminopterin (HAT media). The successfully fused cells are diluted and aliquots of the dilution placed in wells of a microtiter plate where growth of the culture is continued. Antibody-producing clones are identified by detection of antibody in the supernatant fluid of the wells by immunoassay procedures, such as Elisa, as originally described by Engvall, E., Meth. Enzymol. 70:419 (1980), and derivative methods thereof. Selected positive clones can be expanded and their monoclonal antibody product harvested for use. Detailed procedures for monoclonal antibody production are described in Davis, L. et al. Basic Methods in Molecular Biology Elsevier, New York. Section 21-2.

[0807] B. Polyclonal Antibody Production by Immunization

[0808] Polyclonal antiserum containing antibodies to heterogenous epitopes of a single protein can be prepared by immunizing suitable animals with the expressed protein or peptides derived therefrom described above, which can be unmodified or modified to enhance immunogenicity. Effective polyclonal antibody production is affected by many factors related both to the antigen and the host species. For example, small molecules tend to be less immunogenic than others and may require the use of carriers and adjuvant. Also, host animals vary in response to site of inoculations and dose, with both inadequate or excessive doses of antigen resulting in low titer antisera. Small doses (ng level) of antigen administered at multiple intradermal sites appears to be most reliable. An effective immunization protocol for rabbits can be found in Vaitukaitis, J. et al. J. Clin. Endocrinol. Metab. 33:988-991(1971).

[0809] Booster injections can be given at regular intervals, and antiserum harvested when antibody titer thereof, as determined semi-quantitatively, for example, by double immunodiffusion in agar against known concentrations of the antigen, begins to fall. See, for example, Ouchterlony, O. et al., Chap. 19 in: Handbook of Experimental Immunology D. Wier (ed) Blackwell (1973). Plateau concentration of antibody is usually in the range of 0.1 to 0.2 mg/ml of serum (about 12 μM). Affinity of the antisera for the antigen is determined by preparing competitive binding curves, as described, for example, by Fisher, D., Chap. 42 in: Manual of Clinical Immunology, 2d Ed. (Rose and Friedman, Eds.) Amer. Soc. For Microbiol., Washington, D.C. (1980).

[0810] Antibody preparations prepared according to either protocol are useful in quantitative immunoassays which determine concentrations of antigen-bearing substances in biological samples; they are also used semi-quantitatively or qualitatively to identify the presence of antigen in a biological sample. The antibodies may also be used in therapeutic compositions for killing cells expressing the protein or reducing the levels of the protein in the body.

[0811] V. Use of cDNAs or Fragments thereof as Reagents

[0812] The cDNAs of the present invention may be used as reagents in isolation procedures, diagnostic assays, and forensic procedures. For example, sequences from the cDNAs (or genomic DNAs obtainable therefrom) may be detectably labeled and used as probes to isolate other sequences capable of hybridizing to them. In addition, sequences from the cDNAs (or genomic DNAs obtainable therefrom) may be used to design PCR primers to be used in isolation, diagnostic, or forensic procedures.

### EXAMPLE 32

[0813] Preparation of PCR Primers and Amplification of DNA

[0814] The cDNAs (or genomic DNAs obtainable therefrom) may be used to prepare PCR primers for a variety of applications, including isolation procedures for cloning nucleic acids capable of hybridizing to such sequences, diagnostic techniques and forensic techniques. The PCR primers are at least 10 bases, and preferably at least 12, 15, or 17 bases in length. More preferably, the PCR primers are at least 20-30 bases in length. In some embodiments, the PCR primers may be more than 30 bases in length. It is preferred that the primer pairs have approximately the same G/C ratio, so that melting temperatures are approximately the same. A variety of PCR techniques are familiar to those skilled in the art. For a review of PCR technology, see Molecular Cloning to Genetic Engineering White, B. A. Ed. in Methods in Molecular Biology 67: Humana Press, Totowa 1997. In each of these PCR procedures, PCR primers on either side of the nucleic acid sequences to be amplified are added to a suitably prepared nucleic acid sample along with dNTPs and a thermostable polymerase such as Taq polymerase, Pfu polymerase, or Vent polymerase. The nucleic acid in the sample is denatured and the PCR primers are specifically hybridized to complementary nucleic acid sequences in the sample. The hybridized primers are extended. Thereafter, another cycle of denaturation, hybridization, and extension is initiated. The cycles are repeated multiple times to produce an amplified fragment containing the nucleic acid sequence between the primer sites.

### EXAMPLE 33

[0815] Use of cDNAs as Probes

[0816] Probes derived from cDNAs or fragments thereof (or genomic DNAs obtainable therefrom) may be labeled with detectable labels familiar to those skilled in the art, including radioisotopes and non-radioactive labels, to provide a detectable probe. The detectable probe may be single stranded or double stranded and may be made using techniques known in the art, including in vitro transcription, nick translation, or kinase reactions. A nucleic acid sample containing a sequence capable of hybridizing to the labeled probe is contacted with the labeled probe. If the nucleic acid in the sample is double stranded, it may be denatured prior to contacting the probe. In some applications, the nucleic acid sample may be immobilized on a surface such as a nitrocellulose or nylon membrane. The nucleic acid sample may comprise nucleic acids obtained from a variety of sources, including genomic DNA, cDNA libraries, RNA, or tissue samples.

[0817] Procedures used to detect the presence of nucleic acids capable of hybridizing to the detectable probe include well known techniques such as Southern blotting, Northern blotting, dot blotting, colony hybridization, and plaque hybridization. In some applications, the nucleic acid capable of hybridizing to the labeled probe may be cloned into vectors such as expression vectors, sequencing vectors, or in vitro transcription vectors to facilitate the characterization and expression of the hybridizing nucleic acids in the sample. For example, such techniques may be used to isolate and clone sequences in a genomic library or cDNA library which are capable of hybridizing to the detectable probe as described in example 17 above.

[0818] PCR primers made as described in example 32 above may be used in forensic analyses, such as the DNA fingerprinting techniques described in Examples 34-38 below. Such analyses may utilize detectable probes or primers based on the sequences of the cDNAs or fragments thereof (or genomic DNAs obtainable therefrom).

### EXAMPLE 34

[0819] Forensic Matching by DNA Sequencing

[0820] In one exemplary method, DNA samples are isolated from forensic specimens of, for example, hair, semen, blood or skin cells by conventional methods. A panel of PCR primers based on a number of the cDNAs (or genomic DNAs obtainable therefrom), is then utilized in accordance with example 32 to amplify DNA of approximately 100-200 bases in length from the forensic specimen. Corresponding sequences are obtained from a test subject. Each of these identification DNAs is then sequenced using standard techniques, and a simple database comparison determines the differences, if any, between the sequences from the subject and those from the sample. Statistically significant differences between the suspect's DNA sequences and those from the sample conclusively prove a lack of identity. This lack of identity can be proven, for example, with only one sequence. Identity, on the other hand, should be demonstrated with a large number of sequences, all matching. Preferably, a minimum of 50 statistically identical sequences of 100 bases in length are used to prove identity between the suspect and the sample.

### EXAMPLE 35

[0821] Positive Identification by DNA Sequencing

[0822] The technique outlined in the previous example may also be used on a larger scale to provide a unique fingerprint-type identification of any individual. In this technique, primers are prepared from a large number of sequences from Table I and the appended sequence listing. Preferably, 20 to 50 different primers are used. These primers are used to obtain a corresponding number of PCR-generated DNA segments from the individual in question in accordance with example 32. Each of these DNA segments is sequenced, using the methods set forth in example 34. The database of sequences generated through this procedure uniquely identifies the individual from whom the sequences were obtained. The same panel of primers may then be used at any later time to absolutely correlate tissue or other biological specimen with that individual.

### EXAMPLE 36

[0823] Southern Blot Forensic Identification The procedure of example 35 is repeated to obtain a panel of at least 10 amplified sequences from an individual and a specimen. Preferably, the panel contains at least 50 amplified sequences. More preferably, the panel contains 100 amplified sequences. In some embodiments, the panel contains 200 amplified sequences. This PCR-generated DNA is then digested with one or a combination of, preferably, four base specific restriction enzymes. Such enzymes are commercially available and known to those of skill in the art. After digestion, the resultant gene fragments are size separated in multiple duplicate wells on an agarose gel and transferred to nitrocellulose using Southern blotting techniques well known to those with skill in the art. For a review of Southern blotting see Davis et al. (Basic Methods in Molecular Biology, 1986, Elsevier Press. pp 62-65).

[0824] A panel of probes based on the sequences of the cDNAs (or genomic DNAs obtainable therefrom), or fragments thereof of at least 10 bases, are radioactively or calorimetrically labeled using methods known in the art, such as nick translation or end labeling, and hybridized to the Southern blot using techniques known in the art (Davis et al., supra). Preferably, the probe comprises at least 12, 15, or 17 consecutive nucleotides from the cDNA (or genomic DNAs obtainable therefrom). More preferably, the probe comprises at least 20-30 consecutive nucleotides from the cDNA (or genomic DNAs obtainable therefrom). In some embodiments, the probe comprises more than 30 nucleotides from the cDNA (or genomic DNAs obtainable therefrom). In other embodiments, the probe comprises at least 40, at least 50, at least 75, at least 100, at least 150, or at least 200 consecutive nucleotides from the cDNA (or genomic DNAs obtainable therefrom).

[0825] Preferably, at least 5 to 10 of these labeled probes are used, and more preferably at least about 20 or 30 are used to provide a unique pattern. The resultant bands appearing from the hybridization of a large sample of cDNAs (or genomic DNAs obtainable therefrom) will be a 20 unique identifier. Since the restriction enzyme cleavage will be different for every individual, the band pattern on the Southern blot will also be unique. Increasing the number of cDNA probes will provide a statistically higher level of confidence in the identification since there will be an increased number of sets of bands used for identification.

### EXAMPLE 37

[0826] Dot Blot Identification Procedure

[0827] Another technique for identifying individuals using the cDNA sequences disclosed herein utilizes a dot blot hybridization technique.

[0828] Genomic DNA is isolated from nuclei of subject to be identified. Oligonucleotide probes of approximately 30 bp in length are synthesized that correspond to at least 10, preferably 50 sequences from the cDNAs or genomic DNAs obtainable therefrom. The probes are used to hybridize to the genomic DNA through conditions known to those in the art. The oligonucleotides are end labeled with p³² using polynucleotide kinase (Pharmacia). Dot Blots are created by spotting the genomic DNA onto nitrocellulose or the like using a vacuum dot blot manifold (BioRad, Richmond Calif.). The nitrocellulose filter containing the genomic sequences is baked or UV linked to the filter, prehybridized and hybridized with labeled probe using techniques known in the art (Davis et al. supra). The ³²p labeled DNA fragments are sequentially hybridized with successively stringent conditions to detect minimal differences between the 30 bp sequence and the DNA. Tetramethylammonium chloride is useful for identifying clones containing small numbers of nucleotide mismatches (Wood et al., Proc. Natl. Acad. Sci. USA 82(6):1585-1588 (1985)) which is hereby incorporated by reference. A unique pattern of dots distinguishes one individual from another individual.

[0829] cDNAs or oligonucleotides containing at least 10 consecutive bases from these sequences can be used as probes in the following alternative fingerprinting technique. Preferably, the probe comprises at least 12, 15, or 17 consecutive nucleotides from the cDNA (or genomic DNAs obtainable therefrom). More preferably, the probe comprises at least 20-30 consecutive nucleotides from the cDNA (or genomic DNAs obtainable therefrom). In some embodiments, the probe comprises more than 30 nucleotides from the cDNA (or genomic DNAs obtainable therefrom). In other embodiments, the probe comprises at least 40, at least 50, at least 75, at least 100, at least 150, or at least 200 consecutive nucleotides from the cDNA (or genomic DNAs obtainable therefrom).

[0830] Preferably, a plurality of probes having sequences from different genes are used in the alternative fingerprinting technique. Example 38 below provides a representative alternative fingerprinting procedure in which the probes are derived from cDNAs.

### EXAMPLE 38

[0831] Alternative “Fingerprint” Identification Technique

[0832] 20-mer oligonucleotides are prepared from a large number, e.g. 50, 100, or 200, of cDNA sequences (or genomic DNAs obtainable therefrom) using commercially available oligonucleotide services such as Genset, Paris, France. Cell samples from the test subject are processed for DNA using techniques well known to those with skill in the art. The nucleic acid is digested with restriction enzymes such as EcoRI and XbaI. Following digestion, samples are applied to wells for electrophoresis. The procedure, as known in the art, may be modified to accommodate polyacrylamide electrophoresis, however in this example, samples containing 5 ug of DNA are loaded into wells and separated on 0.8% agarose gels. The gels are transferred onto nitrocellulose using standard Southern blotting techniques.

[0833] ng of each of the oligonucleotides are pooled and end-labeled with p³². The nitrocellulose is prehybridized with blocking solution and hybridized with the labeled probes. Following hybridization and washing, the nitrocellulose filter is exposed to X-Omat AR X-ray film. The resulting hybridization pattern will be unique for each individual.

[0834] It is additionally contemplated within this example that the number of probe sequences used can be varied for additional accuracy or clarity.

[0835] The antibodies generated in Examples 18 and 31 above may be used to identify the tissue type or cell species from which a sample is derived as described above.

### EXAMPLE 39

[0836] Identification of Tissue Types or Cell Species by Means of Labeled Tissue Specific Antibodies

[0837] Identification of specific tissues is accomplished by the visualization of tissue specific antigens by means of antibody preparations according to Examples 18 and 31 which are conjugated, directly or indirectly to a detectable marker. Selected labeled antibody species bind to their specific antigen binding partner in tissue sections, cell suspensions, or in extracts of soluble proteins from a tissue sample to provide a pattern for qualitative or semi-qualitative interpretation.

[0838] Antisera for these procedures must have a potency exceeding that of the native preparation, and for that reason, antibodies are concentrated to a mg/ml level by isolation of the gamma globulin fraction, for example, by ion-exchange chromatography or by ammonium sulfate fractionation. Also, to provide the most specific antisera, unwanted antibodies, for example to common proteins, must be removed from the gamma globulin fraction, for example by means of insoluble immunoabsorbents, before the antibodies are labeled with the marker. Either monoclonal or heterologous antisera is suitable for either procedure.

[0839] A. Immunohistochemical Techniques

[0840] Purified, high-titer antibodies, prepared as described above, are conjugated to a detectable marker, as described, for example, by Fudenberg, H., Chap. 26 in: Basic 503 Clinical Immunology, 3rd Ed. Lange, Los Altos, Calif. (1980) or Rose, N. et al., Chap. 12 in: Methods in Immunodiagnosis, 2d Ed. John Wiley 503 Sons, New York (1980).

[0841] A fluorescent marker, either fluorescein or rhodamine, is preferred, but antibodies can also be labeled with an enzyme that supports a color producing reaction with a substrate, such as horseradish peroxidase. Markers can be added to tissue-bound antibody in a second step, as described below. Alternatively, the specific antitissue antibodies can be labeled with ferritin or other electron dense particles, and localization of the ferritin coupled antigen-antibody complexes achieved by means of an electron microscope. In yet another approach, the antibodies are radiolabeled, with, for example ¹²⁵I, and detected by overlaying the antibody treated preparation with photographic emulsion.

[0842] Preparations to carry out the procedures can comprise monoclonal or polyclonal antibodies to a single protein or peptide identified as specific to a tissue type, for example, brain tissue, or antibody preparations to several antigenically distinct tissue specific antigens can be used in panels, independently or in mixtures, as required.

[0843] Tissue sections and cell suspensions are prepared for immunohistochemical examination according to common histological techniques. Multiple cryostat sections (about 4 μm, unfixed) of the unknown tissue and known control, are mounted and each slide covered with different dilutions of the antibody preparation. Sections of known and unknown tissues should also be treated with preparations to provide a positive control, a negative control, for example, pre-immune sera, and a control for non-specific staining, for example, buffer.

[0844] Treated sections are incubated in a humid chamber for 30 min at room temperature, rinsed, then washed in buffer for 30-45 min. Excess fluid is blotted away, and the marker developed.

[0845] If the tissue specific antibody was not labeled in the first incubation, it can be labeled at this time in a second antibody-antibody reaction, for example, by adding fluorescein- or enzyme-conjugated antibody against the immunoglobulin class of the antiserum-producing species, for example, fluorescein labeled antibody to mouse IgG. Such labeled sera are commercially available.

[0846] The antigen found in the tissues by the above procedure can be quantified by measuring the intensity of color or fluorescence on the tissue section, and calibrating that signal using appropriate standards.

[0847] B. Identification of Tissue Specific Soluble Proteins

[0848] The visualization of tissue specific proteins and identification of unknown tissues from that procedure is carried out using the labeled antibody reagents and detection strategy as described for immunohistochemistry; however the sample is prepared according to an electrophoretic technique to distribute the proteins extracted from the tissue in an orderly array on the basis of molecular weight for detection.

[0849] A tissue sample is homogenized using a Virtis apparatus; cell suspensions are disrupted by Dounce homogenization or osmotic lysis, using detergents in either case as required to disrupt cell membranes, as is the practice in the art. Insoluble cell components such as nuclei, microsomes, and membrane fragments are removed by ultracentrifugation, and the soluble protein-containing fraction concentrated if necessary and reserved for analysis.

[0850] A sample of the soluble protein solution is resolved into individual protein species by conventional SDS polyacrylamide electrophoresis as described, for example, by Davis, L. et al., Section 19-2 in: Basic Methods in Molecular Biology (P. Leder, ed), Elsevier, New York (1986), using a range of amounts of polyacrylamide in a set of gels to resolve the entire molecular weight range of proteins to be detected in the sample. A size marker is run in parallel for purposes of estimating molecular weights of the constituent proteins. Sample size for analysis is a convenient volume of from 5 to 55 μl, and containing from about 1 to 100 μg protein. An aliquot of each of the resolved proteins is transferred by blotting to a nitrocellulose filter paper, a process that maintains the pattern of resolution. Multiple copies are prepared. The procedure, known as Western Blot Analysis, is well described in Davis, L. et al., (above) Section 19-3. One set of nitrocellulose blots is stained with Coomassie Blue dye to visualize the entire set of proteins for comparison with the antibody bound proteins. The remaining nitrocellulose filters are then incubated with a solution of one or more specific antisera to tissue specific proteins prepared as described in Examples 18 and 31. In this procedure, as in procedure A above, appropriate positive and negative sample and reagent controls are run.

[0851] In either procedure A or B, a detectable label can be attached to the primary tissue antigen-primary antibody complex according to various strategies and permutations thereof. In a straightforward approach, the primary specific antibody can be labeled; alternatively, the unlabeled complex can be bound by a labeled secondary anti-IgG antibody. In other approaches, either the primary or secondary antibody is conjugated to a biotin molecule, which can, in a subsequent step, bind an avidin conjugated marker. According to yet another strategy, enzyme labeled or radioactive protein A, which has the property of binding to any IgG, is bound in a final step to either the primary or secondary antibody.

[0852] The visualization of tissue specific antigen binding at levels above those seen in control tissues to one or more tissue specific antibodies, prepared from the gene sequences identified from cDNA sequences, can identify tissues of unknown origin, for example, forensic samples, or differentiated tumor tissue that has metastasized to foreign bodily sites.

[0853] In addition to their applications in forensics and identification, cDNAs (or genomic DNAs obtainable therefrom) may be mapped to their chromosomal locations. example 40 below describes radiation hybrid (RH) mapping of human chromosomal regions using cDNAs. example 41 below describes a representative procedure for mapping a cDNA (or a genomic DNA obtainable therefrom) to its location on a human chromosome. example 42 below describes mapping of cDNAs (or genomic DNAs obtainable therefrom) on metaphase chromosomes by Fluorescence In Situ Hybridization (FISH).

### EXAMPLE 40

[0854] Radiation Hybrid Mapping of cDNAs to the Human Genome

[0855] Radiation hybrid (RH) mapping is a somatic cell genetic approach that can be used for high resolution mapping of the human genome. In this approach, cell lines containing one or more human chromosomes are lethally irradiated, breaking each chromosome into fragments whose size depends on the radiation dose. These fragments are rescued by fusion with cultured rodent cells, yielding subclones containing different fragments of the human genome. This technique is described by Benham et al. (Genomics 4:509-517, 1989) and Cox et al., (Science 250:245-250, 1990), the entire contents of which are hereby incorporated by reference. The random and independent nature of the subclones permits efficient mapping of any human genome marker. Human DNA isolated from a panel of 80-100 cell lines provides a mapping reagent for ordering cDNAs (or genomic DNAs obtainable therefrom). In this approach, the frequency of breakage between markers is used to measure distance, allowing construction of fine resolution maps as has been done using conventional ESTs (Schuler et al., Science 274:540-546, 1996, hereby incorporated by reference).

[0856] RH mapping has been used to generate a high-resolution whole genome radiation hybrid map of human chromosome 17q22-q25.3 across the genes for growth hormone (GH) and thymidine kinase (TK) (Foster et al., Genomics 33:185-192, 1996), the region surrounding the Gorlin syndrome gene (Obermayr et al., Eur. J. Hum. Genet. 4:242-245, 1996), 60 loci covering the entire short arm of chromosome 12 (Raeymaekers et al., Genomics 29:170-178, 1995), the region of human chromosome 22 containing the neurofibromatosis type 2 locus (Frazer et al., Genomics 14:574-584, 1992) and 13 loci on the long arm of chromosome 5 (Warrington et al., Genomics 11:701-708, 1991).

### EXAMPLE 41

[0857] Mapping of cDNAs to Human Chromosomes using PCR Techniques

[0858] cDNAs (or genomic DNAs obtainable therefrom) may be assigned to human chromosomes using PCR based methodologies. In such approaches, oligonucleotide primer pairs are designed from the cDNA sequence (or the sequence of a genomic DNA obtainable therefrom) to minimize the chance of amplifying through an intron. Preferably, the oligonucleotide primers are 18-23 bp in length and are designed for PCR amplification. The creation of PCR primers from known sequences is well known to those with skill in the art. For a review of PCR technology see Erlich, H. A., PCR Technology; Principles and Applications for DNA Amplification. 1992. W. H. Freeman and Co., New York.

[0859] The primers are used in polymerase chain reactions (PCR) to amplify templates from total human genomic DNA. PCR conditions are as follows: 60 ng of genomic DNA is used as a template for PCR with 80 ng of each oligonucleotide primer, 0.6 unit of Taq polymerase, and 1 μCu of a ³²P-labeled deoxycytidine triphosphate. The PCR is performed in a microplate thermocycler (Techne) under the following conditions: 30 cycles of 94° C., 1.4 min; 55° C., 2 min; and 72° C., 2 min; with a final extension at 72° C. for 10 min. The amplified products are analyzed on a 6% polyacrylamide sequencing gel and visualized by autoradiography. If the length of the resulting PCR product is identical to the distance between the ends of the primer sequences in the cDNA from which the primers are derived, then the PCR reaction is repeated with DNA templates from two panels of human-rodent somatic cell hybrids, BIOS PCRable DNA (BIOS Corporation) and NIGMS Human-Rodent Somatic Cell Hybrid Mapping Panel Number 1 (NIGMS, Camden, N.J.).

[0860] PCR is used to screen a series of somatic cell hybrid cell lines containing defined sets of human chromosomes for the presence of a given cDNA (or genomic DNA obtainable therefrom). DNA is isolated from the somatic hybrids and used as starting templates for PCR reactions using the primer pairs from the cDNAs (or genomic DNAs obtainable therefrom). Only those somatic cell hybrids with chromosomes containing the human gene corresponding to the cDNA (or genomic DNA obtainable therefrom) will yield an amplified fragment. The cDNAs (or genomic DNAs obtainable therefrom) are assigned to a chromosome by analysis of the segregation pattern of PCR products from the somatic hybrid DNA templates. The single human chromosome present in all cell hybrids that give rise to an amplified fragment is the chromosome containing that cDNA (or genomic DNA obtainable therefrom). For a review of techniques and analysis of results from somatic cell gene mapping experiments. (See Ledbetter et al., Genomics 6:475-481 (1990).)

[0861] Alternatively, the cDNAs (or genomic DNAs obtainable therefrom) may be mapped to individual chromosomes using FISH as described in example 42 below.

### EXAMPLE 42

[0862] Mapping of cDNAs to Chromosomes using Fluorescence in Situ Hybridization

[0863] Fluorescence in situ hybridization allows the cDNA (or genomic DNA obtainable therefrom) to be mapped to a particular location on a given chromosome. The chromosomes to be used for fluorescence in situ hybridization techniques may be obtained from a variety of sources including cell cultures, tissues, or whole blood.

[0864] In a preferred embodiment, chromosomal localization of a cDNA (or genomic DNA obtainable therefrom) is obtained by FISH as described by Cherif et al. (Proc. Natl. Acad. Sci. U.S.A., 87:6639-6643, 1990). Metaphase chromosomes are prepared from phytohemagglutinin (PHA)-stimulated blood cell donors. PHA-stimulated lymphocytes from healthy males are cultured for 72 h in RPMI-1640 medium. For synchronization, methotrexate (10 μM) is added for 17 h, followed by addition of 5-bromodeoxyuridine (5-BudR, 0.1 mM) for 6 h. Colcemid (1 μg/ml) is added for the last 15 min before harvesting the cells. Cells are collected, washed in RPMI, incubated with a hypotonic solution of KCl (75 MM) at 37° C. for 15 min and fixed in three changes of methanol:acetic acid (3:1). The cell suspension is dropped onto a glass slide and air dried. The cDNA (or genomic DNA obtainable therefrom) is labeled with biotin-16 dUTP by nick translation according to the manufacturer's instructions (Bethesda Research Laboratories, Bethesda, Md.), purified using a Sephadex G-50 column (Pharmacia, Upssala, Sweden) and precipitated. Just prior to hybridization, the DNA pellet is dissolved in hybridization buffer (50% formamide, 2×SSC, 10% dextran sulfate, 1 mg/ml sonicated salmon sperm DNA, pH 7) and the probe is denatured at 70° C. for 5-10 min.

[0865] Slides kept at −20° C. are treated for 1 h at 37° C. with RNase A (100 μg/ml), rinsed three times in 2×SSC and dehydrated in an ethanol series. Chromosome preparations are denatured in 70% formamide, 2×SSC for 2 min at 70° C., then dehydrated at 4° C. The slides are treated with proteinase K (10 μg/100 ml in 20 mM Tris-HCl, 2 mM CaCl₂) at 37° C. for 8 min and dehydrated. The hybridization mixture containing the probe is placed on the slide, covered with a coverslip, sealed with rubber cement and incubated overnight in a humid chamber at 37° C. After hybridization and post-hybridization washes, the biotinylated probe is detected by avidin-FITC and amplified with additional layers of biotinylated goat anti-avidin and avidin-FITC. For chromosomal localization, fluorescent R-bands are obtained as previously described (Cherif et al., supra.). The slides are observed under a LEICA fluorescence microscope (DMRXA). Chromosomes are counterstained with propidium iodide and the fluorescent signal of the probe appears as two symmetrical yellow-green spots on both chromatids of the fluorescent R-band chromosome (red). Thus, a particular cDNA (or genomic DNA obtainable therefrom) may be localized to a particular cytogenetic R-band on a given chromosome.

### EXAMPLE 43

[0866] Use of cDNAs to Construct or Expand Chromosome Maps

[0867] Once the cDNAs (or genomic DNAs obtainable therefrom) have been assigned to particular chromosomes using the techniques described in Examples 40-42 above, they may be utilized to construct a high resolution map of the chromosomes on which they are located or to identify the chromosomes in a sample.

[0868] Chromosome mapping involves assigning a given unique sequence to a particular chromosome as described above. Once the unique sequence has been mapped to a given chromosome, it is ordered relative to other unique sequences located on the same chromosome. One approach to chromosome mapping utilizes a series of yeast artificial chromosomes (YACs) bearing several thousand long inserts derived from the chromosomes of the organism from which the cDNAs (or genomic DNAs obtainable therefrom) are obtained. This approach is described in Ramaiah Nagaraja et al. Genome Research 7:210-222, March 1997. Briefly, in this approach each chromosome is broken into overlapping pieces which are inserted into the YAC vector. The YAC inserts are screened using PCR or other methods to determine whether they include the cDNA (or genomic DNA obtainable therefrom) whose position is to be determined. Once an insert has been found which includes the cDNA (or genomic DNA obtainable therefrom), the insert can be analyzed by PCR or other methods to determine whether the insert also contains other sequences known to be on the chromosome or in the region from which the cDNA (or genomic DNA obtainable therefrom) was derived. This process can be repeated for each insert in the YAC library to determine the location of each of the cDNAs (or genomic DNAs obtainable therefrom) relative to one another and to other known chromosomal markers. In this way, a high resolution map of the distribution of numerous unique markers along each of the organisms chromosomes may be obtained.

[0869] As described in example 44 below cDNAs (or genomic DNAs obtainable therefrom) may also be used to identify genes associated with a particular phenotype, such as hereditary disease or drug response.

### EXAMPLE 44

[0870] Identification of Genes Associated with Hereditary Diseases or Drug Response

[0871] This example illustrates an approach useful for the association of cDNAs (or genomic DNAs obtainable therefrom) with particular phenotypic characteristics. In this example, a particular cDNA (or genomic DNA obtainable therefrom) is used as a test probe to associate that cDNA (or genomic DNA obtainable therefrom) with a particular phenotypic characteristic.

[0872] cDNAs (or genomic DNAs obtainable therefrom) are mapped to a particular location on a human chromosome using techniques such as those described in Examples 40 and 41 or other techniques known in the art. A search of Mendelian Inheritance in Man (V. McKusick, Mendelian Inheritance in Man (available on line through Johns Hopkins University Welch Medical Library) reveals the region of the human chromosome which contains the cDNA (or genomic DNA obtainable therefrom) to be a very gene rich region containing several known genes and several diseases or phenotypes for which genes have not been identified. The gene corresponding to this cDNA (or genomic DNA obtainable therefrom) thus becomes an immediate candidate for each of these genetic diseases.

[0873] Cells from patients with these diseases or phenotypes are isolated and expanded in culture. PCR primers from the cDNA (or genomic DNA obtainable therefrom) are used to screen genomic DNA, mRNA or cDNA obtained from the patients. cDNAs (or genomic DNAs obtainable therefrom) that are not amplified in the patients can be positively associated with a particular disease by further analysis. Alternatively, the PCR analysis may yield fragments of different lengths when the samples are derived from an individual having the phenotype associated with the disease than when the sample is derived from a healthy individual, indicating that the gene containing the cDNA may be responsible for the genetic disease.

[0874] VI. Use of cDNAs (or Genomic DNAs Obtainable Therefrom) to Construct Vectors

[0875] The present cDNAs (or genomic DNAs obtainable therefrom) may also be used to construct secretion vectors capable of directing the secretion of the proteins encoded by genes inserted in the vectors. Such secretion vectors may facilitate the purification or enrichment of the proteins encoded by genes inserted therein by reducing the number of background proteins from which the desired protein must be purified or enriched. Exemplary secretion vectors are described below.

### EXAMPLE 45

[0876] Construction of Secretion Vectors

[0877] The secretion vectors of the present invention include a promoter capable of directing gene expression in the host cell, tissue, or organism of interest. Such promoters include the Rous Sarcoma Virus promoter, the SV40 promoter, the human cytomegalovirus promoter, and other promoters familiar to those skilled in the art.

[0878] A signal sequence from a cDNA (or genomic DNA obtainable therefrom), such as one of the signal sequences in SEQ ID NOs: 1-405 as defined in Table I above, is operably linked to the promoter such that the mRNA transcribed from the promoter will direct the translation of the signal peptide. The host cell, tissue, or organism may be any cell, tissue, or organism which recognizes the signal peptide encoded by the signal sequence in the cDNA (or genomic DNA obtainable therefrom). Suitable hosts include mammalian cells, tissues or organisms, avian cells, tissues, or organisms, insect cells, tissues or organisms, or yeast.

[0879] In addition, the secretion vector contains cloning sites for inserting genes encoding the proteins which are to be secreted. The cloning sites facilitate the cloning of the insert gene in frame with the signal sequence such that a fusion protein in which the signal peptide is fused to the protein encoded by the inserted gene is expressed from the mRNA transcribed from the promoter. The signal peptide directs the extracellular secretion of the fusion protein.

[0880] The secretion vector may be DNA or RNA and may integrate into the chromosome of the host, be stably maintained as an extrachromosomal replicon in the host, be an artificial chromosome, or be transiently present in the host. Preferably, the secretion vector is maintained in multiple copies in each host cell. As used herein, multiple copies means at least 2, 5, 10, 20, 25, 50 or more than 50 copies per cell. In some embodiments, the multiple copies are maintained extrachromosomally. In other embodiments, the multiple copies result from amplification of a chromosomal sequence.

[0881] Many nucleic acid backbones suitable for use as secretion vectors are known to those skilled in the art, including retroviral vectors, SV40 vectors, Bovine Papilloma Virus vectors, yeast integrating plasmids, yeast episomal plasmids, yeast artificial chromosomes, human artificial chromosomes, P element vectors, baculovirus vectors, or bacterial plasmids capable of being transiently introduced into the host.

[0882] The secretion vector may also contain a polyA signal such that the polyA signal is located downstream of the gene inserted into the secretion vector.

[0883] After the gene encoding the protein for which secretion is desired is inserted into the secretion vector, the secretion vector is introduced into the host cell, tissue, or organism using calcium phosphate precipitation, DEAE-Dextran, electroporation, liposome-mediated transfection, viral particles or as naked DNA. The protein encoded by the inserted gene is then purified or enriched from the supernatant using conventional techniques such as ammonium sulfate precipitation, immunoprecipitation, immunochromatography, size exclusion chromatography, ion exchange chromatography, and hplc. Alternatively, the secreted protein may be in a sufficiently enriched or pure state in the supernatant or growth media of the host to permit it to be used for its intended purpose without further enrichment.

[0884] The signal sequences may also be inserted into vectors designed for gene therapy. In such vectors, the signal sequence is operably linked to a promoter such that mRNA transcribed from the promoter encodes the signal peptide. A cloning site is located downstream of the signal sequence such that a gene encoding a protein whose secretion is desired may readily be inserted into the vector and fused to the signal sequence. The vector is introduced into an appropriate host cell. The protein expressed from the promoter is secreted extracellularly, thereby producing a therapeutic effect.

[0885] The cDNAs or 5′ ESTs may also be used to clone sequences located upstream of the cDNAs or 5′ ESTs which are capable of regulating gene expression, including promoter sequences, enhancer sequences, and other upstream sequences which influence transcription or translation levels. Once identified and cloned, these upstream regulatory sequences may be used in expression vectors designed to direct the expression of an inserted gene in a desired spatial, temporal, developmental, or quantitative fashion. The next example describes a method for cloning sequences upstream of the cDNAs or 5′ ESTs.

### EXAMPLE 46

[0886] Use of cDNAs or Fragments thereof to Clone Upstream Sequences from Genomic DNA

[0887] Sequences derived from cDNAs or 5′ ESTs may be used to isolate the promoters of the corresponding genes using chromosome walking techniques. In one chromosome walking technique, which utilizes the GenomeWalker™ kit available from Clontech, five complete genomic DNA samples are each digested with a different restriction enzyme which has a 6 base recognition site and leaves a blunt end. Following digestion, oligonucleotide adapters are ligated to each end of the resulting genomic DNA fragments.

[0888] For each of the five genomic DNA libraries, a first PCR reaction is performed according to the manufacturer's instructions (which are incorporated herein by reference) using an outer adaptor primer provided in the kit and an outer gene specific primer. The gene specific primer should be selected to be specific for the cDNA or 5′ EST of interest and should have a melting temperature, length, and location in the cDNA or 5′ EST which is consistent with its use in PCR reactions. Each first PCR reaction contains 5ng of genomic DNA, 5 μl of 10×Tth reaction buffer, 0.2 mM of each dNTP, 0.2 μM each of outer adaptor primer and outer gene specific primer, 1.1 mM of Mg(OAc)₂, and 1 μl of the Tth polymerase 50× mix in a total volume of 50 μl. The reaction cycle for the first PCR reaction is as follows: 1 min at 94° C./2 sec at 94° C., 3 min at 72° C. (7 cycles)/2 sec at 94° C., 3 min at 67° C. (32 cycles)/5 min at 67° C.

[0889] The product of the first PCR reaction is diluted and used as a template for a second PCR reaction according to the manufacturer's instructions using a pair of nested primers which are located internally on the amplicon resulting from the first PCR reaction. For example, 5 μl of the reaction product of the first PCR reaction mixture may be diluted 180 times. Reactions are made in a 50 μl volume having a composition identical to that of the first PCR reaction except the nested primers are used. The first nested primer is specific for the adaptor, and is provided with the GenomeWalker™ kit. The second nested primer is specific for the particular cDNA or 5′ EST for which the promoter is to be cloned and should have a melting temperature, length, and location in the cDNA or 5′ EST which is consistent with its use in PCR reactions. The reaction parameters of the second PCR reaction are as follows: 1 min at 94° C./2 sec at 94° C., 3 min at 72° C. (6 cycles)/2 sec at 94° C., 3 min at 67° C. (25 cycles)/5 min at 67° C.

[0890] The product of the second PCR reaction is purified, cloned, and sequenced using standard techniques. Alternatively, two or more human genomic DNA libraries can be constructed by using two or more restriction enzymes. The digested genomic DNA is cloned into vectors which can be converted into single stranded, circular, or linear DNA. A biotinylated oligonucleotide comprising at least 15 nucleotides from the cDNA or 5′ EST sequence is hybridized to the single stranded DNA. Hybrids between the biotinylated oligonucleotide and the single stranded DNA containing the cDNA or EST sequence are isolated as described in example 17 above. Thereafter, the single stranded DNA containing the cDNA or EST sequence is released from the beads and converted into double stranded DNA using a primer specific for the cDNA or 5′ EST sequence or a primer corresponding to a sequence included in the cloning vector. The resulting double stranded DNA is transformed into bacteria. DNAs containing the 5′ EST or cDNA sequences are identified by colony PCR or colony hybridization.

[0891] Once the upstream genomic sequences have been cloned and sequenced as described above, prospective promoters and transcription start sites within the upstream sequences may be identified by comparing the sequences upstream of the cDNAs or 5′ ESTs with databases containing known transcription start sites, transcription factor binding sites, or promoter sequences.

[0892] In addition, promoters in the upstream sequences may be identified using promoter reporter vectors as described below.

### EXAMPLE 47

[0893] Identification of Promoters in Cloned Upstream Sequences

[0894] The genomic sequences upstream of the cDNAs or fragment thereof are cloned into a suitable promoter reporter vector, such as the pSEAP-Basic, pSEAP-Enhancer, pβgal-Basic, pβgal-Enhancer, or pEGFP-1 Promoter Reporter vectors available from Clontech. Briefly, each of these promoter reporter vectors include multiple cloning sites positioned upstream of a reporter gene encoding a readily assayable protein such as secreted alkaline phosphatase, β galactosidase, or green fluorescent protein. The sequences upstream of the cDNAs or 5′ ESTs are inserted into the cloning sites upstream of the reporter gene in both orientations and introduced into an appropriate host cell. The level of reporter protein is assayed and compared to the level obtained from a vector which lacks an insert in the cloning site. The presence of an elevated expression level in the vector containing the insert with respect to the control vector indicates the presence of a promoter in the insert. If necessary, the upstream sequences can be cloned into vectors which contain an enhancer for augmenting transcription levels from weak promoter sequences. A significant level of expression above that observed with the vector lacking an insert indicates that a promoter sequence is present in the inserted upstream sequence.

[0895] Appropriate host cells for the promoter reporter vectors may be chosen based on the results of the above described determination of expression patterns of the cDNAs and ESTs. For example, if the expression pattern analysis indicates that the mRNA corresponding to a particular cDNA or fragment thereof is expressed in fibroblasts, the promoter reporter vector may be introduced into a human fibroblast cell line.

[0896] Promoter sequences within the upstream genomic DNA may be further defined by constructing nested deletions in the upstream DNA using conventional techniques such as Exonuclease III digestion. The resulting deletion fragments can be inserted into the promoter reporter vector to determine whether the deletion has reduced or obliterated promoter activity. In this way, the boundaries of the promoters may be defined. If desired, potential individual regulatory sites within the promoter may be identified using site directed mutagenesis or linker scanning to obliterate potential transcription factor binding sites within the promoter individually or in combination. The effects of these mutations on transcription levels may be determined by inserting the mutations into the cloning sites in the promoter reporter vectors.

### EXAMPLE 48

[0897] Cloning and Identification of Promoters

[0898] Using the method described in example 47 above with 5′ ESTs, sequences upstream of several genes were obtained.

[0899] The promoters and other regulatory sequences located upstream of the cDNAs or 5′ ESTs may be used to design expression vectors capable of directing the expression of an inserted gene in a desired spatial, temporal, developmental, or quantitative manner. A promoter capable of directing the desired spatial, temporal, developmental, and quantitative patterns may be selected using the results of the expression analysis described in example 10 above. For example, if a promoter which confers a high level of expression in muscle is desired, the promoter sequence upstream of a cDNA or 5′ EST derived from an mRNA which is expressed at a high level in muscle, as determined by the method of example 10, may be used in the expression vector.

[0900] Preferably, the desired promoter is placed near multiple restriction sites to facilitate the cloning of the desired insert downstream of the promoter, such that the promoter is able to drive expression of the inserted gene. The promoter may be inserted in conventional nucleic acid backbones designed for extrachromosomal replication, integration into the host chromosomes or transient expression. Suitable backbones for the present expression vectors include retroviral backbones, backbones from eukaryotic episomes such as SV40 or Bovine Papilloma Virus, backbones from bacterial episomes, or artificial chromosomes.

[0901] Preferably, the expression vectors also include a polyA signal downstream of the multiple restriction sites for directing the polyadenylation of mRNA transcribed from the gene inserted into the expression vector.

[0902] Following the identification of promoter sequences using the procedures of Examples 4648, proteins which interact with the promoter may be identified as described in example 49 below.

### EXAMPLE 49

[0903] Identification of Proteins which Interact with Promoter Sequences, Upstream Regulatory Sequences, or mRNA

[0904] Sequences within the promoter region which are likely to bind transcription factors may be identified by identity to known transcription factor binding sites or through conventional mutagenesis or deletion analyses of reporter plasmids containing the promoter sequence. For example, deletions may be made in a reporter plasmid containing the promoter sequence of interest operably linked to an assayable reporter gene. The reporter plasmids carrying various deletions within the promoter region are transfected into an appropriate host cell and the effects of the deletions on expression levels is assessed. Transcription factor binding sites within the regions in which deletions reduce expression levels may be further localized using site directed mutagenesis, linker scanning analysis, or other techniques familiar to those skilled in the art. Nucleic acids encoding proteins which interact with sequences in the promoter may be identified using one-hybrid systems such as those described in the manual accompanying the Matchmaker One-Hybrid System kit avalilabe from Clontech (Catalog No. K1603-1), the disclosure of which is incorporated herein by reference. Briefly, the Matchmaker One-hybrid system is used as follows. The target sequence for which it is desired to identify binding proteins is cloned upstream of a selectable reporter gene and integrated into the yeast genome. Preferably, multiple copies of the target sequences are inserted into the reporter plasmid in tandem.

[0905] A library comprised of fusions between cDNAs to be evaluated for the ability to bind to the promoter and the activation domain of a yeast transcription factor, such as GAL4, is transformed into the yeast strain containing the integrated reporter sequence. The yeast are plated on selective media to select cells expressing the selectable marker linked to the promoter sequence. The colonies which grow on the selective media contain genes encoding proteins which bind the target sequence. The inserts in the genes encoding the fusion proteins are further characterized by sequencing. In addition, the inserts may be inserted into expression vectors or in vitro transcription vectors. Binding of the polypeptides encoded by the inserts to the promoter DNA may be confirmed by techniques familiar to those skilled in the art, such as gel shift analysis or DNAse protection analysis.

[0906] VII. Use of cDNAs (or Genomic DNAs Obtainable therefrom) in Gene Therapy

[0907] The present invention also comprises the use of cDNAs (or genomic DNAs obtainable therefrom) in gene therapy strategies, including antisense and triple helix strategies as described in Examples 50 and 51 below. In antisense approaches, nucleic acid sequences complementary to an mRNA are hybridized to the mRNA intracellularly, thereby blocking the expression of the protein encoded by the mRNA. The antisense sequences may prevent gene expression through a variety of mechanisms. For example, the antisense sequences may inhibit the ability of ribosomes to translate the mRNA. Alternatively, the antisense sequences may block transport of the mRNA from the nucleus to the cytoplasm, thereby limiting the amount of mRNA available for translation. Another mechanism through which antisense sequences may inhibit gene expression is by interfering with mRNA splicing. In yet another strategy, the antisense nucleic acid may be incorporated in a ribozyme capable of specifically cleaving the target mRNA.

### EXAMPLE 50

[0908] Preparation and use of Antisense Oligonucleotides

[0909] The antisense nucleic acid molecules to be used in gene therapy may be either DNA or RNA sequences. They may comprise a sequence complementary to the sequence of the cDNA (or genomic DNA obtainable therefrom). The antisense nucleic acids should have a length and melting temperature sufficient to permit formation of an intracellular duplex having sufficient stability to inhibit the expression of the mRNA in the duplex. Strategies for designing antisense nucleic acids suitable for use in gene therapy are disclosed in Green et al., Ann. Rev. Biochem., 55:569-597 (1986) and Izant and Weintraub, Cell, 36:1007-1015 (1984), which are hereby incorporated by reference.

[0910] In some strategies, antisense molecules are obtained from a nucleotide sequence encoding a protein by reversing the orientation of the coding region with respect to a promoter so as to transcribe the opposite strand from that which is normally transcribed in the cell. The antisense molecules may be transcribed using in vitro transcription systems such as those which employ T7 or SP6 polymerase to generate the transcript. Another approach involves transcription of the antisense nucleic acids in vivo by operably linking DNA containing the antisense sequence to a promoter in an expression vector.

[0911] Alternatively, oligonucleotides which are complementary to the strand normally transcribed in the cell may be synthesized in vitro. Thus, the antisense nucleic acids are complementary to the corresponding mRNA and are capable of hybridizing to the mRNA to create a duplex. In some embodiments, the antisense sequences may contain modified sugar phosphate backbones to increase stability and make them less sensitive to RNase activity. Examples of modifications suitable for use in antisense strategies include 2′ O-methyl RNA oligonucleotides and Protein-nucleic acid (PNA) oligonucleotides. Further examples are described by Rossi et al., Pharmacol. Ther., 50(2):245-254, (1991).

[0912] Various types of antisense oligonucleotides complementary to the sequence of the cDNA (or genomic DNA obtainable therefrom) may be used. In one preferred embodiment, stable and semi-stable antisense oligonucleotides described in International Application No. PCT WO94/23026, hereby incorporated by reference, are used. In these moleucles, the 3′ end or both the 3′ and 5′ ends are engaged in intramolecular hydrogen bonding between complementary base pairs. These molecules are better able to withstand exonuclease attacks and exhibit increased stability compared to conventional antisense oligonucleotides.

[0913] In another preferred embodiment, the antisense oligodeoxynucleotides against herpes simplex virus types 1 and 2 described in International Application No. WO 95/04141, hereby incorporated by reference, are used.

[0914] In yet another preferred embodiment, the covalently cross-linked antisense oligonucleotides described in International Application No. WO 96/31523, hereby incorporated by reference, are used. These double- or single-stranded oligonucleotides comprise one or more, respectively, inter- or intra-oligonucleotide covalent cross-linkages, wherein the linkage consists of an amide bond between a primary amine group of one strand and a carboxyl group of the other strand or of the same strand, respectively, the primary amine group being directly substituted in the 2′ position of the strand nucleotide monosaccharide ring, and the carboxyl group being carried by an aliphatic spacer group substituted on a nucleotide or nucleotide analog of the other strand or the same strand, respectively.

[0915] The antisense oligodeoxynucleotides and oligonucleotides disclosed in International Application No. WO 92/18522, incorporated by reference, may also be used. These molecules are stable to degradation and contain at least one transcription control recognition sequence which binds to control proteins and are effective as decoys therefor. These molecules may contain “hairpin” structures, “dumbbell” structures, “modified dumbbell” structures, “cross-linked” decoy structures and “loop” structures.

[0916] In another preferred embodiment, the cyclic double-stranded oligonucleotides described in European Patent Application No. 0 572 287 A2, hereby incorporated by reference are used. These ligated oligonucleotide “dumbbells” contain the binding site for a transcription factor and inhibit expression of the gene under control of the transcription factor by sequestering the factor.

[0917] Use of the closed antisense oligonucleotides disclosed in International Application No. WO 92/19732, hereby incorporated by reference, is also contemplated. Because these molecules have no free ends, they are more resistant to degradation by exonucleases than are conventional oligonucleotides. These oligonucleotides may be multifunctional, interacting with several regions which are not adjacent to the target mRNA.

[0918] The appropriate level of antisense nucleic acids required to inhibit gene expression may be determined using in vitro expression analysis. The antisense molecule may be introduced into the cells by diffusion, injection, infection or transfection using procedures known in the art. For example, the antisense nucleic acids can be introduced into the body as a bare or naked oligonucleotide, oligonucleotide encapsulated in lipid, oligonucleotide sequence encapsidated by viral protein, or as an oligonucleotide operably linked to a promoter contained in an expression vector. The expression vector may be any of a variety of expression vectors known in the art, including retroviral or viral vectors, vectors capable of extrachromosomal replication, or integrating vectors. The vectors may be DNA or RNA.

[0919] The antisense molecules are introduced onto cell samples at a number of different concentrations preferably between 1×10⁻¹⁰M to 1×1⁻⁴M. Once the minimum concentration that can adequately control gene expression is identified, the optimized dose is translated into a dosage suitable for use in vivo. For example, an inhibiting concentration in culture of 1×10⁻⁷ translates into a dose of approximately 0.6 mg/kg bodyweight. Levels of oligonucleotide approaching 100 mg/kg bodyweight or higher may be possible after testing the toxicity of the oligonucleotide in laboratory animals. It is additionally contemplated that cells from the vertebrate are removed, treated with the antisense oligonucleotide, and reintroduced into the vertebrate.

[0920] It is further contemplated that the antisense oligonucleotide sequence is incorporated into a ribozyme sequence to enable the antisense to specifically bind and cleave its target mRNA. For technical applications of ribozyme and antisense oligonucleotides see Rossi et al., supra.

[0921] In a preferred application of this invention, the polypeptide encoded by the gene is first identified, so that the effectiveness of antisense inhibition on translation can be monitored using techniques that include but are not limited to antibody-mediated tests such as RIAs and ELISA, functional assays, or radiolabeling.

[0922] The cDNAs of the present invention (or genomic DNAs obtainable therefrom) may also be used in gene therapy approaches based on intracellular triple helix formation. Triple helix oligonucleotides are used to inhibit transcription from a genome. They are particularly useful for studying alterations in cell activity as it is associated with a particular gene. The cDNAs (or genomic DNAs obtainable therefrom) of the present invention or, more preferably, a fragment of those sequences, can be used to inhibit gene expression in individuals having diseases associated with expression of a particular gene. Similarly, a fragment of the cDNA (or genomic DNA obtainable therefrom) can be used to study the effect of inhibiting transcription of a particular gene within a cell. Traditionally, homopurine sequences were considered the most useful for triple helix strategies. However, homopyrimidine sequences can also inhibit gene expression. Such homopyrimidine oligonucleotides bind to the major groove at homopurine:homopyrimidine sequences. Thus, both types of sequences from the cDNA or from the gene corresponding to the cDNA are contemplated within the scope of this invention.

### EXAMPLE 51

[0923] Preparation and use of Triple Helix Probes

[0924] The sequences of the cDNAs (or genomic DNAs obtainable therefrom) are scanned to identify 10-mer to 20-mer homopyrimidine or homopurine stretches which could be used in triple-helix based strategies for inhibiting gene expression. Following identification of candidate homopyrimidine or homopurine stretches, their efficiency in inhibiting gene expression is assessed by introducing varying amounts of oligonucleotides containing the candidate sequences into tissue culture cells which normally express the target gene. The oligonucleotides may be prepared on an oligonucleotide synthesizer or they may be purchased commercially from a company specializing in custom oligonucleotide synthesis, such as GENSET, Paris, France.

[0925] The oligonucleotides may be introduced into the cells using a variety of methods known to those skilled in the art, including but not limited to calcium phosphate precipitation, DEAE-Dextran, electroporation, liposome-mediated transfection or native uptake.

[0926] Treated cells are monitored for altered cell function or reduced gene expression using techniques such as Northern blotting, RNase protection assays, or PCR based strategies to monitor the transcription levels of the target gene in cells which have been treated with the oligonucleotide. The cell functions to be monitored are predicted based upon the homologies of the target gene corresponding to the cDNA from which the oligonucleotide was derived with known gene sequences that have been associated with a particular function. The cell functions can also be predicted based on the presence of abnormal physiologies within cells derived from individuals with a particular inherited disease, particularly when the cDNA is associated with the disease using techniques described in example 44.

[0927] The oligonucleotides which are effective in inhibiting gene expression in tissue culture cells may then be introduced in vivo using the techniques described above and in example 50 at a dosage calculated based on the in vitro results, as described in example 50.

[0928] In some embodiments, the natural (beta) anomers of the oligonucleotide units can be replaced with alpha anomers to render the oligonucleotide more resistant to nucleases. Further, an intercalating agent such as ethidium bromide, or the like, can be attached to the 3′ end of the alpha oligonucleotide to stabilize the triple helix. For information on the generation of oligonucleotides suitable for triple helix formation see Griffin et al. (Science, 245:967-971 (1989), which is hereby incorporated by this reference).

### EXAMPLE 52

[0929] Use of cDNAs to Express an Encoded Protein in a Host Organism

[0930] The cDNAs of the present invention may also be used to express an encoded protein in a host organism to produce a beneficial effect. In such procedures, the encoded protein may be transiently expressed in the host organism or stably expressed in the host organism. The encoded protein may have any of the activities described above. The encoded protein may be a protein which the host organism lacks or, alternatively, the encoded protein may augment the existing levels of the protein in the host organism.

[0931] A full length cDNA encoding the signal peptide and the mature protein, or a cDNA encoding only the mature protein is introduced into the host organism. The cDNA may be introduced into the host organism using a variety of techniques known to those of skill in the art. For example, the cDNA may be injected into the host organism as naked DNA such that the encoded protein is expressed in the host organism, thereby producing a beneficial effect.

[0932] Alternatively, the cDNA may be cloned into an expression vector downstream of a promoter which is active in the host organism. The expression vector may be any of the expression vectors designed for use in gene therapy, including viral or retroviral vectors.

[0933] The expression vector may be directly introduced into the host organism such that the encoded protein is expressed in the host organism to produce a beneficial effect. In another approach, the expression vector may be introduced into cells in vitro. Cells containing the expression vector are thereafter selected and introduced into the host organism, where they express the encoded protein to produce a beneficial effect.

### EXAMPLE 53

[0934] Use of Signal Peptides to Import Proteins into Cells

[0935] The short core hydrophobic region (h) of signal peptides encoded by the cDNAs of the present invention or fragment thereof may also be used as a carrier to import a peptide or a protein of interest, so-called cargo, into tissue culture cells (Lin et al., J. Biol. Chem., 270: 14225-14258 (1995); Du et al., J. Peptide Res., 51: 235-243 (1998); Rojas et al., Nature Biotech., 16: 370-375 (1998)).

[0936] When cell permeable peptides of limited size (approximately up to 25 amino acids) are to be translocated across cell membrane, chemical synthesis may be used in order to add the h region to either the C-terminus or the N-terminus to the cargo peptide of interest. Alternatively, when longer peptides or proteins are to be imported into cells, nucleic acids can be genetically engineered, using techniques familiar to those skilled in the art, in order to link the cDNA sequence or fragment thereof encoding the h region to the 5′ or the 3′ end of a DNA sequence coding for a cargo polypeptide. Such genetically engineered nucleic acids are then translated either in vitro or in vivo after transfection into appropriate cells, using conventional techniques to produce the resulting cell permeable polypeptide. Suitable hosts cells are then simply incubated with the cell permeable polypeptide which is then translocated across the membrane.

[0937] This method may be applied to study diverse intracellular functions and cellular processes. For instance, it has been used to probe functionally relevant domains of intracellular proteins and to examine protein-protein interactions involved in signal transduction pathways (Lin et al., supra; Lin et al., J. Biol. Chem., 271: 5305-5308 (1996); Rojas et al., J. Biol. Chem., 271: 27456-27461 (1996); Liu et al., Proc. Natl. Acad. Sci. USA, 93: 11819-11824 (1996); Rojas et al., Bioch. Biophys. Res. Commun., 234: 675-680 (1997)).

[0938] Such techniques may be used in cellular therapy to import proteins producing therapeutic effects. For instance, cells isolated from a patient may be treated with imported therapeutic proteins and then re-introduced into the host organism.

[0939] Alternatively, the h region of signal peptides of the present invention could be used in combination with a nuclear localization signal to deliver nucleic acids into cell nucleus. Such oligonucleotides may be antisense oligonucleotides or oligonucleotides designed to form triple helixes, as described in examples 50 and 51 respectively, in order to inhibit processing and maturation of a target cellular RNA.

### EXAMPLE 54

[0940] Computer Embodiments

[0941] As used herein the term “cDNA codes of SEQ ID NOs. 1-405” encompasses the nucleotide sequences of SEQ ID NOs. 1-405, fragments of SEQ ID NOs. 1-405, nucleotide sequences homologous to SEQ ID NOs. 1-405 or homologous to fragments of SEQ ID NOs. 1-405, and sequences complementary to all of the preceding sequences. The fragments include fragments of SEQ ID NOs. 1-405 comprising at least 8, 10, 12, 15, 18, 20, 25, 28, 30, 35, 40, 50, 75, 100, 150, 200, 300, 400, 500, 1000 or 2000 consecutive nucleotides of SEQ ID NOs. 1-405. Preferably, the fragments are novel fragments. Preferably the fragments include polynucleotides described in Table III or fragments thereof comprising at least 8, 10, 12, 15, 18, 20, 25, 28, 30, 35, 40, 50, 75, 100, 150, 200, 300, 400, 500, 1000 or 2000 consecutive nucleotides of the polynucleotides described in Table III. Homologous sequences and fragments of SEQ ID NOs. 1-405 refer to a sequence having at least 99%, 98%, 97%, 96%, 95%, 90%, 85%, 80%, or 75% identity to these sequences. Identity may be determined using any of the computer programs and parameters described in example 17, including BLAST2N with the default parameters or with any modified parameters. Homologous sequences also include RNA sequences in which uridines replace the thymines in the cDNA codes of SEQ ID NOs. 1-405. The homologous sequences may be obtained using any of the procedures described herein or may result from the correction of a sequencing error as described above. Preferably the homologous sequences and fragments of SEQ ID NOs. 1-405 include polynucleotides described in Table III or fragments comprising at least 8, 10, 12, 15, 18, 20, 25, 28, 30, 35, 40, 50, 75, 100, 150, 200, 300, 400, 500, 1000 or 2000 consecutive nucleotides of the polynucleotides described in Table III. It will be appreciated that the cDNA codes of SEQ ID NOs. 1-405 can be represented in the traditional single character format (See the inside back cover of Styer, Lubert. Biochemistry, 3^{rd} edition. W. H Freeman & Co., New York.) or in any other format which records the identity of the nucleotides in a sequence.

[0942] As used herein the term “polypeptide codes of SEQ ID NOS. 406-810” encompasses the polypeptide sequences of SEQ ID NOs. 406-810 which are encoded by the cDNAs of SEQ ID NOs. 1-405, polypeptide sequences homologous to the polypeptides of SEQ ID NOS. 406-810, or fragments of any of the preceding sequences. Homologous polypeptide sequences refer to a polypeptide sequence having at least 99%, 98%, 97%, 96%, 95%, 90%, 85%, 80%, 75% identity to one of the polypeptide sequences of SEQ ID NOS. 406-810. Identity may be determined using any of the computer programs and parameters described herein, including FASTA with the default parameters or with any modified parameters. The homologous sequences may be obtained using any of the procedures described herein or may result from the correction of a sequencing error as described above. The polypeptide fragments comprise at least 5, 8, 10, 12, 15, 20, 25, 30, 35, 40, 50, 60, 75, 100, 150 or 200 consecutive amino acids of the polypeptides of SEQ ID NOS. 406-810. Preferably, the fragments are novel fragments. Preferably, the fragments include polypeptides encoded by the polynucleotides described in Table III, or fragments thereof comprising at least 5, 10, 15, 20, 25, 30, 35, 40, 50, 75, 100, or 150 consecutive amino acids of the polypeptides encoded by the polynucleotides described in Table III. It will be appreciated that the polypeptide codes of the SEQ ID NOS. 406-810 can be represented in the traditional single character format or three letter format (See the inside back cover of Starrier, Lubert. Biochemistry, 3^{rd} edition. W. H Freeman & Co., New York.) or in any other format which relates the identity of the polypeptides in a sequence.

[0943] It will be appreciated by those skilled in the art that the cDNA codes of SEQ ID NOs. 1-405 and polypeptide codes of SEQ ID NOS. 406-810 can be stored, recorded, and manipulated on any medium which can be read and accessed by a computer. As used herein, the words “recorded” and “stored” refer to a process for storing information on a computer medium. A skilled artisan can readily adopt any of the presently known methods for recording information on a computer readable medium to generate manufactures comprising one or more of the cDNA codes of SEQ ID NOs. 1-405, one or more of the polypeptide codes of SEQ ID NOS. 406-810. Another aspect of the present invention is a computer readable medium having recorded thereon at least 2, 5, 10, 15, 20, 25, 30, or 50 cDNA codes of SEQ ID NOs. 1-405. Another aspect of the present invention is a computer readable medium having recorded thereon at least 2, 5, 10, 15, 20, 25, 30, or 50 polypeptide codes of SEQ ID NOS. 406-810.

[0944] Computer readable media include magnetically readable media, optically readable media, electronically readable media and magnetic/optical media. For example, the computer readable media may be a hard disk, a floppy disk, a magnetic tape, CD-ROM, Digital Versatile Disk (DVD), Random Access Memory (RAM), or Read Only Memory (ROM) as well as other types of other media known to those skilled in the art.

[0945] Embodiments of the present invention include systems, particularly computer systems which store and manipulate the sequence information described herein. One example of a computer system 100 is illustrated in block diagram form in FIG. 6. As used herein, “a computer system” refers to the hardware components, software components, and data storage components used to analyze the nucleotide sequences of the cDNA codes of SEQ ID NOs. 1-405, or the amino acid sequences of the polypeptide codes of SEQ ID NOS. 406-810. In one embodiment, the computer system 100 is a Sun Enterprise 1000 server (Sun Microsystems, Palo Alto, Calif.). The computer system 100 preferably includes a processor for processing, accessing and manipulating the sequence data. The processor 105 can be any well-known type of central processing unit, such as the Pentium III from Intel Corporation, or similar processor from Sun, Motorola, Compaq or International Business Machines.

[0946] Preferably, the computer system 100 is a general purpose system that comprises the processor 105 and one or more internal data storage components 110 for storing data, and one or more data retrieving devices for retrieving the data stored on the data storage components. A skilled artisan can readily appreciate that any one of the currently available computer systems are suitable.

[0947] In one particular embodiment, the computer system 100 includes a processor 105 connected to a bus which is connected to a main memory 115 (preferably implemented as RAM) and one or more internal data storage devices 110, such as a hard drive and/or other computer readable media having data recorded thereon. In some embodiments, the computer system 100 further includes one or more data retrieving device 118 for reading the data stored on the internal data storage devices 110.

[0948] The data retrieving device 118 may represent, for example, a floppy disk drive, a compact disk drive, a magnetic tape drive, etc. In some embodiments, the internal data storage device 110 is a removable computer readable medium such as a floppy disk, a compact disk, a magnetic tape, etc. containing control logic and/or data recorded thereon. The computer system 100 may advantageously include or be programmed by appropriate software for reading the control logic and/or the data from the data storage component once inserted in the data retrieving device.

[0949] The computer system 100 includes a display 120 which is used to display output to a computer user. It should also be noted that the computer system 100 can be linked to other computer systems 125a-c in a network or wide area network to provide centralized access to the computer system 100.

[0950] Software for accessing and processing the nucleotide sequences of the cDNA codes of SEQ ID NOs. 1-405, or the amino acid sequences of the polypeptide codes of SEQ ID NOS. 406-810 (such as search tools, compare tools, and modeling tools etc.) may reside in main memory 115 during execution.

[0951] In some embodiments, the computer system 100 may further comprise a sequence comparer for comparing the above-described cDNA codes of SEQ ID NOs. 1-405 or polypeptide codes of SEQ ID NOS. 406-810 stored on a computer readable medium to reference nucleotide or polypeptide sequences stored on a computer readable medium. A “sequence comparer” refers to one or more programs which are implemented on the computer system 100 to compare a nucleotide or polypeptide sequence with other nucleotide or polypeptide sequences and/or compounds including but not limited to peptides, peptidomimetics, and chemicals stored within the data storage means. For example, the sequence comparer may compare the nucleotide sequences of the cDNA codes of SEQ ID NOs1-405, or the amino acid sequences of the polypeptide codes of SEQ ID NOS. 406-810 stored on a computer readable medium to reference sequences stored on a computer readable medium to identify homologies, motifs implicated in biological function, or structural motifs. The various sequence comparer programs identified elsewhere in this patent specification are particularly contemplated for use in this aspect of the invention.

[0952] FIG. 7 is a flow diagram illustrating one embodiment of a process 200 for comparing a new nucleotide or protein sequence with a database of sequences in order to determine the identity levels between the new sequence and the sequences in the database. The database of sequences can be a private database stored within the computer system 100, or a public database such as GENBANK, PIR or SWISSPROT that is available through the Internet.

[0953] The process 200 begins at a start state 201 and then moves to a state 202 wherein the new sequence to be compared is stored to a memory in a computer system 100. As discussed above, the memory could be any type of memory, including RAM or an internal storage device.

[0954] The process 200 then moves to a state 204 wherein a database of sequences is opened for analysis and comparison. The process 200 then moves to a state 206 wherein the first sequence stored in the database is read into a memory on the computer. A comparison is then performed at a state 210 to determine if the first sequence is the same as the second sequence. It is important to note that this step is not limited to performing an exact comparison between the new sequence and the first sequence in the database. Well-known methods are known to those of skill in the art for comparing two nucleotide or protein sequences, even if they are not identical. For example, gaps can be introduced into one sequence in order to raise the identity level between the two tested sequences. The parameters that control whether gaps or other features are introduced into a sequence during comparison are normally entered by the user of the computer system.

[0955] Once a comparison of the two sequences has been performed at the state 210, a determination is made at a decision state 210 whether the two sequences are the same. Of course, the term “same” is not limited to sequences that are absolutely identical. Sequences that are within the identity parameters entered by the user will be marked as “same” in the process 200.

[0956] If a determination is made that the two sequences are the same, the process 200 moves to a state 214 wherein the name of the sequence from the database is displayed to the user. This state notifies the user that the sequence with the displayed name fulfills the identity constraints that were entered. Once the name of the stored sequence is displayed to the user, the process 200 moves to a decision state 218 wherein a determination is made whether more sequences exist in the database. If no more sequences exist in the database, then the process 200 terminates at an end state 220. However, if more sequences do exist in the database, then the process 200 moves to a state 224 wherein a pointer is moved to the next sequence in the database so that it can be compared to the new sequence. In this manner, the new sequence is aligned and compared with every sequence in the database.

[0957] It should be noted that if a determination had been made at the decision state 212 that the sequences were not homologous, then the process 200 would move immediately to the decision state 218 in order to determine if any other sequences were available in the database for comparison.

[0958] Accordingly, one aspect of the present invention is a computer system comprising a processor, a data storage device having stored thereon a nucleic acid code of SEQ ID NOs. 1-405 or a polypeptide code of SEQ ID NOS. 406-810, a data storage device having retrievably stored thereon reference nucleotide sequences or polypeptide sequences to be compared to the nucleic acid code of SEQ ID NOs. 1-405 or polypeptide code of SEQ ID NOS. 406-810 and a sequence comparer for conducting the comparison. The sequence comparer may indicate a identity level between the sequences compared or identify structural motifs in the above described nucleic acid code of SEQ ID NOs. 1-405 and polypeptide codes of SEQ ID NOS. 406-810 or it may identify structural motifs in sequences which are compared to these cDNA codes and polypeptide codes. In some embodiments, the data storage device may have stored thereon the sequences of at least 2, 5, 10, 15, 20, 25, 30, or 50 of the cDNA codes of SEQ ID NOs.1-405 or polypeptide codes of SEQ ID NOS. 406-810.

[0959] Another aspect of the present invention is a method for determining the level of identity between a nucleic acid code of SEQ ID NOs. 1-405 and a reference nucleotide sequence, comprising the steps of reading the nucleic acid code and the reference nucleotide sequence through the use of a computer program which determines identity levels and determining identity between the nucleic acid code and the reference nucleotide sequence with the computer program. The computer program may be any of a number of computer programs for determining identity levels, including those specifically enumerated herein, including BLAST2N with the default parameters or with any modified parameters. The method may be implemented using the computer systems described above. The method may also be performed by reading 2, 5, 10, 15, 20, 25, 30, or 50 of the above described cDNA codes of SEQ ID NOs. 1-405 through use of the computer program and determining identity between the cDNA codes and reference nucleotide sequences.

[0960] FIG. 8 is a flow diagram illustrating one embodiment of a process 250 in a computer for determining whether two sequences are homologous. The process 250 begins at a start state 252 and then moves to a state 254 wherein a first sequence to be compared is stored to a memory. The second sequence to be compared is then stored to a memory at a state 256. The process 250 then moves to a state 260 wherein the first character in the first sequence is read and then to a state 262 wherein the first character of the second sequence is read. It should be understood that if the sequence is a nucleotide sequence, then the character would normally be either A, T, C, G or U. If the sequence is a protein sequence, then it should be in the single letter amino acid code so that the first and sequence sequences can be easily compared.

[0961] A determination is then made at a decision state 264 whether the two characters are the same. If they are the same, then the process 250 moves to a state 268 wherein the next characters in the first and second sequences are read. A determination is then made whether the next characters are the same. If they are, then the process 250 continues this loop until two characters are not the same. If a determination is made that the next two characters are not the same, the process 250 moves to a decision state 274 to determine whether there are any more characters either sequence to read.

[0962] If there aren't any more characters to read, then the process 250 moves to a state 276 wherein the level of identity between the first and second sequences is displayed to the user. The level of identity is determined by calculating the profragment of characters between the sequences that were the same out of the total number of sequences in the first sequence. Thus, if every character in a first 100 nucleotide sequence aligned with a every character in a second sequence, the identity level would be 100%.

[0963] Alternatively, the computer program may be a computer program which compares the nucleotide sequences of the cDNA codes of the present invention, to reference nucleotide sequences in order to determine whether the nucleic acid code of SEQ ID NOs. 1-405 differs from a reference nucleic acid sequence at one or more positions. Optionally such a program records the length and identity of inserted, deleted or substituted nucleotides with respect to the sequence of either the reference polynucleotide or the nucleic acid code of SEQ ID NOs. 1-405. In one embodiment, the computer program may be a program which determines whether the nucleotide sequences of the cDNA codes of SEQ ID NOs. 1-405 contain a biallelic marker or single nucleotide polymorphism (SNP) with respect to a reference nucleotide sequence. This single nucleotide polymorphism may comprise a single base substitution, insertion, or deletion, while this biallelic marker may comprise about one to ten consecutive bases substituted, inserted or deleted.

[0964] Another aspect of the present invention is a method for determining the level of identity between a polypeptide code of SEQ ID NOS. 406-810 and a reference polypeptide sequence, comprising the steps of reading the polypeptide code of SEQ ID NOS. 406-810 and the reference polypeptide sequence through use of a computer program which determines identity levels and determining identity between the polypeptide code and the reference polypeptide sequence using the computer program.

[0965] Accordingly, another aspect of the present invention is a method for determining whether a nucleic acid code of SEQ ID NOs. 1-405 differs at one or more nucleotides from a reference nucleotide sequence comprising the steps of reading the nucleic acid code and the reference nucleotide sequence through use of a computer program which identifies differences between nucleic acid sequences and identifying differences between the nucleic acid code and the reference nucleotide sequence with the computer program. In some embodiments, the computer program is a program which identifies single nucleotide polymorphisms. The method may be implemented by the computer systems described above and the method illustrated in FIG. 8. The method may also be performed by reading at least 2, 5, 10, 15, 20, 25, 30, or 50 of the cDNA codes of SEQ ID NOs. 1-405 and the reference nucleotide sequences through the use of the computer program and identifying differences between the cDNA codes and the reference nucleotide sequences with the computer program.

[0966] In other embodiments the computer based system may further comprise an identifier for identifying features within the nucleotide sequences of the cDNA codes of SEQ ID NOs. 1-405 or the amino acid sequences of the polypeptide codes of SEQ ID NOS. 406-810.

[0967] An “identifier” refers to one or more programs which identifies certain features within the above-described nucleotide sequences of the cDNA codes of SEQ ID NOs. 1-405 or the amino acid sequences of the polypeptide codes of SEQ ID NOS. 406-810. In one embodiment, the identifier may comprise a program which identifies an open reading frame in the cDNAs codes of SEQ ID NOs. 1-405.

[0968] FIG. 9 is a flow diagram illustrating one embodiment of an identifier process 300 for detecting the presence of a feature in a sequence. The process 300 begins at a start state 302 and then moves to a state 304 wherein a first sequence that is to be checked for features is stored to a memory 115 in the computer system 100. The process 300 then moves to a state 306 wherein a database of sequence features is opened. Such a database would include a list of each feature's attributes along with the name of the feature. For example, a feature name could be “Initiation Codon” and the attribute would be “ATG”. Another example would be the feature name “TAATAA Box” and the feature attribute would be “TAATAA”. An example of such a database is produced by the University of Wisconsin Genetics Computer Group (www.gcg.com).

[0969] Once the database of features is opened at the state 306, the process 300 moves to a state 308 wherein the first feature is read from the database. A comparison of the attribute of the first feature with the first sequence is then made at a state 310. A determination is then made at a decision state 316 whether the attribute of the feature was found in the first sequence. If the attribute was found, then the process 300 moves to a state 318 wherein the name of the found feature is displayed to the user.

[0970] The process 300 then moves to a decision state 320 wherein a determination is made whether move features exist in the database. If no more features do exist, then the process 300 terminates at an end state 324. However, if more features do exist in the database, then the process 300 reads the next sequence feature at a state 326 and loops back to the state 310 wherein the attribute of the next feature is compared against the first sequence.

[0971] It should be noted, that if the feature attribute is not found in the first sequence at the decision state 316, the process 300 moves directly to the decision state 320 in order to determine if any more features exist in the database.

[0972] In another embodiment, the identifier may comprise a molecular modeling program which determines the 3-dimensional structure of the polypeptides codes of SEQ ID NOS. 406-810. In some embodiments, the molecular modeling programidentifies target sequences that are most compatible with profiles representing the structural environments of the residues in known three-dimensional protein structures. (See, e.g., Eisenberg et al., U.S. Pat. No. 5,436,850 issued Jul. 25, 1995). In another technique, the known three-dimensional structures of proteins in a given family are superimposed to define the structurally conserved regions in that family. This protein modeling technique also uses the known three-dimensional structure of a homologous protein to approximate the structure of the polypeptide codes of SEQ ID NOS. 406-810. (See e.g., Srinivasan, et al., U.S. Pat. No. 5,557,535 issued Sep. 17, 1996). Conventional identity modeling techniques have been used routinely to build models of proteases and antibodies. (Sowdhamini et al., Protein Engineering 10:207, 215 (1997)). Comparative approaches can also be used to develop three-dimensional protein models when the protein of interest has poor sequence identity to template proteins. In some cases, proteins fold into similar three-dimensional structures despite having very weak sequence identities. For example, the three-dimensional structures of a number of helical cytokines fold in similar three-dimensional topology in spite of weak sequence identity.

[0973] The recent development of threading methods now enables the identification of likely folding patterns in a number of situations where the structural relatedness between target and template(s) is not detectable at the sequence level. Hybrid methods, in which fold recognition is performed using Multiple Sequence Threading (MST), structural equivalencies are deduced from the threading output using a distance geometry program DRAGON to construct a low resolution model, and a full-atom representation is constructed using a molecular modeling package such as QUANTA.

[0974] According to this 3-step approach, candidate templates are first identified by using the novel fold recognition algorithm MST, which is capable of performing simultaneous threading of multiple aligned sequences onto one or more 3-D structures. In a second step, the structural equivalencies obtained from the MST output are converted into inter-residue distance restraints and fed into the distance geometry program DRAGON, together with auxiliary information obtained from secondary structure predictions. The program combines the restraints in an unbiased manner and rapidly generates a large number of low resolution model confirmations. In a third step, these low resolution model confirmations are converted into full-atom models and subjected to energy minimization using the molecular modeling package QUANTA. (See e.g., Asz6di et al., Proteins:Structure, Function, and Genetics, Supplement 1:38-42 (1997)).

[0975] The results of the molecular modeling analysis may then be used in rational drug design techniques to identify agents which modulate the activity of the polypeptide codes of SEQ ID NOS. 74-123.

[0976] Accordingly, another aspect of the present invention is a method of identifying a feature within the cDNA codes of SEQ ID NOs. 1-405 or the polypeptide codes of SEQ ID NOS. 406-810 comprising reading the nucleic acid code(s) or the polypeptide code(s) through the use of a computer program which identifies features therein and identifying features within the nucleic acid code(s) or polypeptide code(s) with the computer program. In one embodiment, computer program comprises a computer program which identifies open reading frames. In a further embodiment, the computer program comprises a computer program which identifies linear or structural motifs in a polypeptide sequence. In another embodiment, the computer program comprises a molecular modeling program. The method may be performed by reading a single sequence or at least 2, 5, 10, 15, 20, 25, 30, or 50 of the cDNA codes of SEQ ID NOs. 1-405 or the polypeptide codes of SEQ ID NOS. 406-810 through the use of the computer program and identifying features within the cDNA codes or polypeptide codes with the computer program.

[0977] The cDNA codes of SEQ ID NOs. 1-405 or the polypeptide codes of SEQ ID NOS. 406-810 may be stored and manipulated in a variety of data processor programs in a variety of formats. For example, the cDNA codes of SEQ ID NOs. 1-405 or the polypeptide codes of SEQ ID NOS. 406-810 may be stored as text in a word processing file, such as MicrosoftWORD or WORDPERFECT or as an ASCII file in a variety of database programs familiar to those of skill in the art, such as DB2, SYBASE, or ORACLE. In addition, many computer programs and databases may be used as sequence comparers, identifiers, or sources of reference nucleotide or polypeptide sequences to be compared to the cDNA codes of SEQ ID NOs.1-405 or the polypeptide codes of SEQ ID NOS406-810. The following list is intended not to limit the invention but to provide guidance to programs and databases which are useful with the cDNA codes of SEQ ID NOs. 1-405 or the polypeptide codes of SEQ ID NOS. 406-810. The programs and databases which may be used include, but are not limited to: MacPattern (EMBL), DiscoveryBase (Molecular Applications Group), GeneMine (Molecular Applications Group), Look (Molecular Applications Group), MacLook (Molecular Applications Group), BLAST and BLAST2 (NCB1), BLASTN and BLASTX (Altschul et al, J. Mol. Biol. 215: 403 (1990)), FASTA (Pearson and Lipman, Proc. Natl. Acad. Sci. USA, 85: 2444 (1988)), FASTDB (Brutlag et al. Comp. App. Biosci. 6:237-245, 1990), Catalyst (Molecular Simulations Inc.), Catalyst/SHAPE (Molecular Simulations Inc.), Cerius².DBAccess (Molecular Simulations Inc.), HypoGen (Molecular Simulations Inc.), Insight II, (Molecular Simulations Inc.), Discover (Molecular Simulations Inc.), CHARMm (Molecular Simulations Inc.), Felix (Molecular Simulations Inc.), DelPhi, (Molecular Simulations Inc.), QuanteMM, (Molecular Simulations Inc.), Homology (Molecular Simulations Inc.), Modeler (Molecular Simulations Inc.), ISIS (Molecular Simulations Inc.), Quanta/Protein Design (Molecular Simulations Inc.), WebLab (Molecular Simulations Inc.), WebLab Diversity Explorer (Molecular Simulations Inc.), Gene Explorer (Molecular Simulations Inc.), SeqFold (Molecular Simulations Inc.), the EMBL/Swissprotein database, the MDL Available Chemicals Directory database, the MDL Drug Data Report data base, the Comprehensive Medicinal Chemistry database, Derwents's World Drug Index database, the BioByteMasterFile database, the Genbank database, and the Genseqn database. Many other programs and data bases would be apparent to one of skill in the art given the present disclosure.

[0978] Motifs which may be detected using the above programs include sequences encoding leucine zippers, helix-turn-helix motifs, glycosylation sites, ubiquitination sites, alpha helices, and beta sheets, signal sequences encoding signal peptides which direct the secretion of the encoded proteins, sequences implicated in transcription regulation such as homeoboxes, acidic stretches, enzymatic active sites, substrate binding sites, and enzymatic cleavage sites.

### EXAMPLE 55

[0979] Methods of Making Nucleic Acids

[0980] The present invention also comprises methods of making the cDNA of SEQ ID Nos. 406-810, genomic DNA obtainable therefrom, or fragment thereof. The methods comprise sequentially linking together nucleotides to produce the nucleic acids having the preceding sequences. A variety of methods of synthesizing nucleic acids are known to those skilled in the art.

[0981] In many of these methods, synthesis is conducted on a solid support. These included the 3′ phosphoramidite methods in which the 3′ terminal base of the desired oligonucleotide is immobilized on an insoluble carrier. The nucleotide base to be added is blocked at the 5′ hydroxyl and activated at the 3′ hydroxyl so as to cause coupling with the immobilized nucleotide base. Deblocking of the new immobilized nucleotide compound and repetition of the cycle will produce the desired polynucleotide. Alternatively, polynucleotides may be prepared as described in U.S. Pat. No. 5,049,656. In some embodiments, several polynucleotides prepared as described above are ligated together to generate longer polynucleotides having a desired sequence.

### EXAMPLE 56

[0982] Methods of Making Polypeptides

[0983] The present invention also comprises methods of making the polynucleotides encoded by the cDNA of SEQ ID Nos. 1-405, genomic DNA obtainable therefrom, or fragments thereof and methods of making the polypeptides of SEQ ID Nos. 406-810 or fragments thereof. The methods comprise sequentially linking together amino acids to produce the nucleic polypeptides having the preceding sequences. In some embodiments, the polypeptides made by these methods are 150 amino acids or less in length. In other embodiments, the polypeptides made by these methods are 120 amino acids or less in length.

[0984] A variety of methods of making polypeptides are known to those skilled in the art, including methods in which the carboxyl terminal amino acid is bound to polyvinyl benzene or another suitable resin. The amino acid to be added possesses blocking groups on its amino moiety and any side chain reactive groups so that only its carboxyl moiety can react. The carboxyl group is activated with carbodiimide or another activating agent and allowed to couple to the immobilized amino acid. After removal of the blocking group, the cycle is repeated to generate a polypeptide having the desired sequence. Alternatively, the methods described in U.S. Pat. No. 5,049,656 may be used.

### EXAMPLE 57

[0985] Immunoaffinity Chromatography

[0986] Antibodies prepared as described above are coupled to a support. Preferably, the antibodies are monoclonal antibodies, but polyclonal antibodies may also be used. The support may be any of those typically employed in immunoaffinity chromatography, including Sepharose CL-4B (Pharmacia, Piscataway, N.J.), Sepharose CL-2B (Pharmacia, Piscataway, N.J.), Affi-gel 10 (Biorad, Richmond, Calif.), or glass beads.

[0987] The antibodies may be coupled to the support using any of the coupling reagents typically used in immunoaffinity chromatography, including cyanogen bromide. After coupling the antibody to the support, the support is contacted with a sample which contains a target polypeptide whose isolation, purification or enrichment is desired. The target polypeptide may be a polypeptide of SEQ ID NOs. 406-810, a fragment thereof, or a fusion protein comprising a polypeptide of SEQ ID NOs. 406-810 or a fragment thereof.

[0988] Preferably, the sample is placed in contact with the support for a sufficient amount of time and under appropriate conditions to allow at least 50% of the target polypeptide to specifically bind to the antibody coupled to the support.

[0989] Thereafter, the support is washed with an appropriate wash solution to remove polypeptides which have non-specifically adhered to the support. The wash solution may be any of those typically employed in immunoaffinity chromatography, including PBS, Tris-lithium chloride buffer (0.1M lysine base and 0.5M lithium chloride, pH 8.0), Tris-hydrochloride buffer (0.05M Tris-hydrochloride, pH 8.0), or Tris/Triton/NaCl buffer (50 mM Tris.cl, pH 8.0 or 9.0, 0.1% Triton X-100, and 0.5 MNaCl).

[0990] After washing, the specifically bound target polypeptide is eluted from the support using the high pH or low pH elution solutions typically employed in immunoaffinity chromatography. In particular, the elution solutions may contain an eluant such as triethanolamine, diethylamine, calcium chloride, sodium thiocyanate, potasssium bromide, acetic acid, or glycine. In some embodiments, the elution solution may also contain a detergent such as Triton X-100 or octyl-β-D-glucoside.

[0991] As discussed above, the cDNAs of the present invention or fragments thereof can be used for various purposes. The polynucleotides can be used to express recombinant protein for analysis, characterization or therapeutic use; as markers for tissues in which the corresponding protein is preferentially expressed (either constitutively or at a particular stage of tissue differentiation or development or in disease states); as molecular weight markers on Southern gels; as chromosome markers or tags (when labeled) to identify chromosomes or to map related gene positions; to compare with endogenous DNA sequences in patients to identify potential genetic disorders; as probes to hybridize and thus discover novel, related DNA sequences; as a source of information to derive PCR primers for genetic fingerprinting; for selecting and making oligomers for attachment to a “gene chip” or other support, including for examination for expression patterns; to raise anti-protein antibodies using DNA immunization techniques; and as an antigen to raise anti-DNA antibodies or elicit another immune response. Where the polynucleotide encodes a protein which binds or potentially binds to another protein (such as, for example, in a receptor-ligand interaction), the polynucleotide can also be used in interaction trap assays (such as, for example, that described in Gyuris et al., Cell 75:791-803 (1993)) to identify polynucleotides encoding the other protein with which binding occurs or to identify inhibitors of the binding interaction.

[0992] The proteins or polypeptides provided by the present invention can similarly be used in assays to determine biological activity, including in a panel of multiple proteins for high-throughput screening; to raise antibodies or to elicit another immune response; as a reagent (including the labeled reagent) in assays designed to quantitatively determine levels of the protein (or its receptor) in biological fluids; as markers for tissues in which the corresponding protein is preferentially expressed (either constitutively or at a particular stage of tissue differentiation or development or in a disease state); and, of course, to isolate correlative receptors or ligands. Where the protein binds or potentially binds to another protein (such as, for example, in a receptor-ligand interaction), the protein can be used to identify the other protein with which binding occurs or to identify inhibitors of the binding interaction. Proteins involved in these binding interactions can also be used to screen for peptide or small molecule inhibitors or agonists of the binding interaction.

[0993] Any or all of these research utilities are capable of being developed into reagent grade or kit format for commercialization as research products.

[0994] Methods for performing the uses listed above are well known to those skilled in the art. References disclosing such methods include without limitation “Molecular Cloning; A Laboratory Manual”, 2d ed., Cole Spring Harbor Laboratory Press, Sambrook, J., E. F. Fritsch and T. Maniatis eds., 1989, and “Methods in Enzymology; Guide to Molecular Cloning Techniques”, Academic Press, Berger, S. L. and A. R. Kimmel eds., 1987.

[0995] Polynucleotides and proteins of the present invention can also be used as nutritional sources or supplements. Such uses include without limitation use as a protein or amino acid supplement, use as a carbon source, use as a nitrogen source and use as a source of carbohydrate. In such cases the protein or polynucleotide of the invention can be added to the feed of a particular organism or can be administered as a separate solid or liquid preparation, such as in the form of powder, pills, solutions, suspensions or capsules. In the case of microorganisms, the protein or polynucleotide of the invention can be added to the medium in or on which the microorganism is cultured.

[0996] Although this invention has been described in terms of certain preferred embodiments, other embodiments which will be apparent to those of ordinary skill in the art in view of the disclosure herein are also within the scope of this invention. Accordingly, the scope of the invention is intended to be defined only by reference to the appended claims. All documents cited herein are incorporated herein by reference in their entirety.

TABLE I

| | | | Mature | | | |
|---|---|---|---|---|---|---|
| | FCS | SigPep | Polypeptide | Stop Codon | PolyA Signal | PolyA Site |
| Id | Location | Location | Location | Location | Location | Location |
| 1 | 153/1127 | 153/230 | 231/1127 | 1128 | 1415/1420 | 1434/1450 |
| 2 | 261/1166 | 261/314 | 315/1166 | 1167 | — | 1524/1556 |
| 3 | 67/813 | 67/111 | 112/813 | 814 | 1023/1028 | 1042/1058 |
| 4 | 187/438 | — | 187/438 | 439 | 612/617 | 632/648 |
| 5 | 92/1753 | 92/130 | 131/1753 | 1754 | 2070/2075 | 2090/2104 |
| 6 | 144/440 | 144/287 | 288/440 | 441 | 457/462 | 500/515 |
| 7 | 174/443 | 174/269 | 270/443 | 444 | 623/628 | 647/661 |
| 8 | 55/399 | 55/192 | 193/399 | 400 | 654/659 | 680/694 |
| 9 | 90/287 | 90/146 | 147/287 | 288 | 1078/1083 | 1096/1110 |
| 10 | 49/447 | 49/111 | 112/447 | 448 | 579/584 | 602/623 |
| 11 | 199/618 | 199/408 | 409/618 | 619 | 626/631 | 643/657 |
| 12 | 271/969 | 271/366 | 367/969 | 970 | 1092/1097 | 1123/1137 |
| 13 | 192/440 | 192/278 | 279/440 | 441 | 590/595 | 622/636 |
| 14 | 59/703 | 59/181 | 182/703 | 704 | 783/788 | 804/818 |
| 15 | 139/1389 | 139/198 | 199/1389 | 1390 | 1854/1859 | 1873/1888 |
| 16 | 21/1118 | 21/89 | 90/1118 | 1119 | 1858/1863 | 1879/1894 |
| 17 | 143/592 | 143/277 | 278/592 | 593 | 1877/1882 | 1899/1913 |
| 18 | 76/999 | 76/279 | 280/999 | 1000 | 1711/1716 | 1729/1744 |
| 19 | 123/464 | 123/269 | 270/464 | 465 | 908/913 | 931/946 |
| 20 | 85/1230 | 85/129 | 130/1230 | 1231 | 1589/1594 | 1607/1622 |
| 21 | 29/664 | 29/619 | 620/664 | 665 | 657/662 | 699/715 |
| 22 | 18/878 | 18/95 | 96/878 | 879 | 1500/1505 | 1533/1549 |
| 23 | 73/1008 | 73/147 | 148/1008 | 1009 | 1286/1291 | 1312/1328 |
| 24 | 165/842 | 165/251 | 252/842 | 843 | 1474/1479 | 1500/1515 |
| 25 | 31/1248 | 31/135 | 136/1248 | 1249 | 1580/1585 | 1607/1622 |
| 26 | 131/490 | 131/301 | 302/490 | 491 | 1411/1416 | 1434/1448 |
| 27 | 61/690 | 61/168 | 169/690 | 691 | 858/863 | 879/894 |
| 28 | 501/1253 | 501/1229 | 1230/1253 | 1254 | 1392/1397 | 1432/1447 |
| 29 | 25/402 | 25/96 | 97/402 | 403 | 1500/1505 | 1525/1540 |
| 30 | 280/678 | 280/411 | 412/678 | 679 | 1606/1611 | 1628/1643 |
| 31 | 64/726 | 64/147 | 148/726 | 727 | 1279/1284 | 1300/1314 |
| 32 | 42/1097 | 42/110 | 111/1097 | 1098 | 2323/2328 | 2341/2356 |
| 33 | 245/1399 | 245/796 | 797/1399 | 1400 | 1669/1674 | 1687/1701 |
| 34 | 235/441 | 235/303 | 304/441 | 442 | — | 758/772 |
| 35 | 88/411 | 88/234 | 235/411 | 412 | 938/943 | 964/987 |
| 36 | 129/452 | 129/212 | 213/452 | 453 | 1290/1295 | 1309/1324 |
| 37 | 238/612 | 238/348 | 349/612 | 613 | 1885/1890 | 1905/1918 |
| 38 | 229/735 | 229/492 | 493/735 | 736 | 816/821 | 841/852 |
| 39 | 168/413 | 168/335 | 336/413 | 414 | 684/689 | 708/726 |
| 40 | 100/852 | 100/159 | 160/852 | 853 | 998/1003 | 1019/1039 |
| 41 | 238/1152 | 238/339 | 340/1152 | 1153 | 1298/1303 | 1324/1355 |
| 42 | 187/369 | 187/312 | 313/369 | 370 | 489/494 | 558/572 |
| 43 | 121/459 | 121/165 | 166/459 | 460 | 497/502 | 521/535 |
| 44 | 34/336 | 34/123 | 124/336 | 337 | 536/541 | 556/572 |
| 45 | 119/409 | 119/388 | 389/409 | 410 | 769/774 | 789/804 |
| 46 | 232/534 | 232/306 | 307/534 | 535 | 595/600 | 615/629 |
| 47 | 140/595 | 140/442 | 443/595 | 596 | 630/635 | 655/669 |
| 48 | 32/658 | 32/289 | 290/658 | 659 | 936/941 | 959/973 |
| 49 | 14/280 | 14/76 | 77/280 | 281 | — | 776/791 |
| 50 | 93/290 | 93/149 | 150/290 | 291 | 1078/1083 | 1096/1110 |
| 51 | 131-1042 | 131-169 | 170-1042 | — | — | 1042-1053 |
| 52 | 100-276 | — | 100-276 | 277 | 638-643 | 662-675 |
| 53 | 111-401 | 111-194 | 195-401 | 402 | 1080-1085 | 1101-1112 |
| 54 | 359-514 | 359-454 | 455-514 | 515 | — | 536-547 |
| 55 | 26-397 | 26-316 | 317-397 | 398 | 1164-1169 | 1187-1198 |
| 56 | 36-725 | 36-107 | 108-725 | 726 | 1302-1307 | 1389-1400 |
| 57 | 35-250 | 35-130 | 131-250 | 251 | 505-510 | 526-538 |
| 58 | 169-432 | 169-267 | 268-432 | 433 | 1132-1137 | 1155-1167 |
| 59 | 143-460 | 143-238 | 239-460 | 461 | 697-702 | 721-730 |
| 60 | 108-908 | 108-170 | 171-908 | 909 | 1141-1146 | 1161-1174 |
| 61 | 209-532 | — | 209-532 | 533 | 1133-1138 | 1146-1158 |
| 62 | 5-211 | 5-142 | 143-211 | 212 | 716-721 | 742-754 |
| 63 | 98-850 | 98-181 | 182-850 | 851 | 1035-1040 | 1060-1073 |
| 64 | 46-342 | 46-189 | 190-342 | 343 | 377-382 | 402-413 |
| 65 | 139-381 | 139-231 | 232-381 | 382 | 579-584 | 598-609 |
| 66 | 72-512 | — | 72-512 | — | — | 512-522 |
| 67 | 126-944 | 126-260 | 261-944 | 945 | 1283-1288 | 1309-1322 |
| 68 | 50-1279 | 50-160 | 161-1279 | — | — | 1280-1290 |
| 69 | 83-1261 | 83-139 | 140-1261 | 1262 | — | — |
| 70 | 57-1199 | 57-95 | 96-1199 | 1200 | 1438-1443 | 1458-1470 |
| 71 | 72-944 | 72-197 | 198-944 | 945 | — | 970-982 |
| 72 | 4-279 | — | 4-279 | 280 | 425-430 | 443-455 |
| 73 | 90-470 | 90-278 | 279-470 | 471 | 704-709 | 724-738 |
| 74 | 88-339 | 88-147 | 148-339 | 340 | 619-624 | 637-649 |
| 75 | 33-578 | 33-92 | 93-578 | 579 | — | 703-714 |
| 76 | 33-245 | 33-107 | 108-245 | 246 | 546-551 | 584-596 |
| 77 | 125-343 | — | 125-343 | 344 | 375-380 | 390-403 |
| 78 | 126-632 | 126-575 | 576-632 | 633 | 670-675 | 721-727 |
| 79 | 90-317 | 90-155 | 156-317 | 318 | 913-918 | 932-944 |
| 80 | 126-410 | 126-287 | 288-410 | 411 | 561-566 | 587-598 |
| 81 | 85-348 | 85-150 | 151-348 | — | — | 349-360 |
| 82 | 77-343 | 77-124 | 125-343 | 344 | 461-466 | 477-490 |
| 83 | 38-364 | — | 38-364 | 365 | 458-463 | 475-488 |
| 84 | 48-389 | 48-356 | 357-389 | 390 | 742-747 | 760-771 |
| 85 | 69-440 | 69-359 | 360-440 | 441 | 927-932 | 947-959 |
| 86 | 33-311 | 33-98 | 99-311 | 312 | 437-442 | 455-464 |
| 87 | 110-730 | 110-235 | 236-730 | 731 | 764-769 | 787-799 |
| 88 | 38-214 | — | 38-214 | 215 | — | 308-320 |
| 89 | 129-296 | 129-209 | 209-296 | 297 | — | 318-331 |
| 90 | 78-563 | 78-359 | 340-563 | 564 | 1042-1047 | 1063-1075 |
| 91 | 62-523 | 62-265 | 266-523 | 524 | 602-607 | 621-632 |
| 92 | 24-320 | — | 24-320 | 321 | 402407 | 419-430 |
| 93 | 42-170 | 42-113 | 114-170 | 171 | — | 172-185 |
| 94 | 108-314 | 108-170 | 171-314 | 315 | 550-555 | 574-585 |
| 95 | 118-351 | 118-171 | 172-351 | 352 | 583-588 | 602-613 |
| 96 | 128-367 | 128-268 | 269-367 | 368 | 410-415 | 424-427 |
| 97 | 149-871 | 149-457 | 458-871 | 872 | — | 893-912 |
| 99 | 7-471 | 7-99 | 100-471 | 472 | 537-542 | 554-568 |
| 100 | 168 / 332 | — | 168 / 332 | 333 | — | — |
| 101 | 51 / 251 | 51 / 110 | 111 / 251 | 252 | 849 / 854 | 882 / 895 |
| 102 | 20 / 613 | 20 / 82 | 83 / 613 | 614 | — | — |
| 103 | 12 / 416 | 12 / 86 | 87 / 416 | 417 | 425 / 430 | 445 / 458 |
| 104 | 276 / 1040 | 276 / 485 | 486 / 1040 | 1041 | — | 2024 / 2036 |
| 105 | 443 / 619 | 443 / 589 | 590 / 619 | 620 | — | 1267 / 1276 |
| 106 | 206 / 747 | — | 206 / 747 | — | — | — |
| 107 | 36 / 521 | 36 / 104 | 105 / 521 | 522 | 528 / 533 | 548 / 561 |
| 108 | 36 / 395 | 36 / 104 | 105 / 395 | 396 | 599 / 604 | 619 / 632 |
| 109 | 21 / 41 | — | 21 / 41 | 42 | 328 / 333 | 357 / 370 |
| 110 | 35 / 631 | 35 / 160 | 161 / 631 | 632 | 901 / 906 | 979 / 994 |
| 111 | 271 / 399 | — | 271 / 399 | 400 | — | — |
| 112 | 103 / 252 | 103 / 213 | 214 / 252 | 253 | — | 588 / 597 |
| 113 | 2 / 460 | — | 2 / 460 | 461 | 713 / 718 | 735 / 748 |
| 114 | 31 / 231 | — | 31 / 231 | 232 | 769 / 774 | 690 / 703 |
| 115 | 305 / 565 | — | 305 / 565 | 566 | 694 / 699 | 713 / 725 |
| 116 | 124 / 873 | 124 / 378 | 379 / 873 | 874 | 1673 / 1678 | 1694 / 1705 |
| 117 | 135 / 206 | — | 135 / 206 | 207 | 850 / 855 | 1056 / 1069 |
| 118 | 135 / 818 | — | 135 / 818 | 819 | 909 / 914 | 1071 / 1084 |
| 119 | 33 / 290 | 33 / 92 | 93 / 290 | 291 | — | — |
| 120 | 485 / 616 | — | 485 / 616 | 617 | — | 669 / 682 |
| 121 | 54 / 995 | 54 / 227 | 228 / 995 | 996 | 1130 / 1135 | 1181 / 1191 |
| 122 | 657 / 923 | 657 / 896 | 897 / 923 | 924 | 957 / 962 | 974 / 1008 |
| 123 | 18 / 311 | 18 / 62 | 63 / 311 | 312 | — | — |
| 124 | 151 / 426 | 151 / 258 | 259 / 426 | 427 | 505 / 510 | 527 / 538 |
| 125 | 10 / 1062 | 10 / 57 | 58 / 1062 | 1063 | 1710 / 1715 | 1735 / 1747 |
| 126 | 78 / 491 | 78 / 218 | 219 / 491 | 492 | 1652 / 1657 | 1673 / 1686 |
| 127 | 69 / 371 | 69 / 287 | 288 / 371 | 372 | 510 / 515 | 530 / 542 |
| 128 | 2 / 757 | 2 / 205 | 206 / 757 | 758 | — | 1160 / 1174 |
| 129 | 2 / 1051 | 2 / 205 | 206 / 1051 | 1052 | 1248 / 1253 | 1272 / 1285 |
| 130 | 2 / 1171 | 2 / 205 | 206 / 1171 | 1172 | 1368 / 1373 | 1386 / 1398 |
| 131 | 42 / 611 | 42 / 287 | 288 / 611 | 612 | 787 / 792 | 808 / 821 |
| 132 | 62 / 916 | 62 / 757 | 758 / 916 | — | — | 904 / 916 |
| 133 | 62 / 520 | — | 62 / 520 | 521 | 1124 / 1129 | 1141 / 1153 |
| 134 | 21 / 167 | — | 21 / 167 | 168 | — | — |
| 135 | 22 / 318 | 22 / 93 | 94 / 318 | 319 | 497 / 502 | 516 / 526 |
| 136 | 8 / 292 | 8 / 118 | 119 / 292 | 293 | 317 / 322 | 339 / 352 |
| 137 | 16 / 378 | 16 / 84 | 85 / 378 | 379 | 502 / 507 | 522 / 542 |
| 138 | 57 / 233 | — | 57 / 233 | — | — | — |
| 139 | 83 / 340 | 83 / 124 | 125 / 340 | 341 | 573 / 578 | 607 / 660 |
| 140 | 47 / 541 | 47 / 220 | 221 / 541 | 542 | — | 597 / 605 |
| 141 | 46 / 285 | 46 / 150 | 151 / 285 | 286 | 364 / 369 | 385 / 396 |
| 142 | 22 / 240 | 22 / 84 | 85 / 240 | 241 | 397 / 402 | 421 / 432 |
| 143 | 89 / 382 | — | 89 / 382 | 383 | — | 408 / 420 |
| 144 | 80 / 415 | 80 / 142 | 143 / 415 | — | 471 / 476 | 488 / 501 |
| 145 | 152 / 361 | 152 / 283 | 284 / 361 | 362 | — | — |
| 146 | 32 / 307 | 32 / 70 | 71 / 307 | 308 | 1240 / 1245 | 1261 / 1272 |
| 147 | 114 / 734 | 114 / 239 | 240 / 734 | 735 | 768 / 773 | 793 / 804 |
| 148 | 199 / 802 | — | 199 / 802 | — | 780 / 785 | 791 / 802 |
| 149 | 38 / 1174 | 38 / 148 | 149 / 1174 | 1175 | 1452 / 1457 | 1478 / 1490 |
| 150 | 26 / 361 | — | 26 / 361 | — | — | 350 / 361 |
| 151 | 3 / 131 | — | 3 / 131 | 132 | — | 591 / 605 |
| 152 | 33 / 185 | 33 / 80 | 81 / 185 | 186 | 570 / 575 | 586 / 591 |
| 153 | 184 / 915 | 184 / 237 | 238 / 915 | 916 | 1119 / 1124 | 1139 / 1150 |
| 154 | 58 / 1116 | 58 / 159 | 160 / 1116 | 1117 | 1486 / 1491 | 1504 / 1513 |
| 155 | 327 / 417 | — | 327 / 417 | — | — | 404 / 417 |
| 156 | 63 / 398 | 63 / 206 | 207 / 398 | 399 | — | — |
| 157 | 2 / 163 | — | 2 / 163 | | 488 / 493 | 511 / 522 |
| 158 | 13 / 465 | 13 / 75 | 76 / 465 | 466 | — | — |
| 159 | 20 / 703 | 20 / 94 | 95 / 703 | 704 | 1000 / 1005 | 1023 / 1041 |
| 160 | 103 / 294 | 103 / 243 | 244 / 294 | 295 | — | — |
| 161 | 81 / 518 | 81 / 173 | 174 / 518 | 519 | — | — |
| 162 | 66 / 326 | — | 66 / 326 | 327 | 1066 / 1071 | 1087 / 1098 |
| 163 | 170 / 289 | 170 / 250 | 251 / 289 | 290 | — | — |
| 164 | 36 / 497 | — | 36 / 497 | 498 | 650 / 655 | 663 / 685 |
| 165 | 18 / 320 | — | 18 / 320 | 321 | 539 / 544 | 542 / 554 |
| 166 | 71 / 1438 | 71 / 136 | 137 / 1438 | 1439 | 1644 / 1649 | 1665 / 1678 |
| 167 | 25 / 318 | 25 / 75 | 76 / 318 | 319 | 452 / 457 | 482 / 494 |
| 168 | 84 / 332 | 84 / 170 | 171 / 332 | 333 | — | 702 / 714 |
| 169 | 32 / 718 | 32 / 100 | 101 / 718 | 719 | 770 / 775 | 793 / 805 |
| 170 | 26 / 481 | 26 / 88 | 89 / 481 | 482 | 755 / 760 | 775 / 787 |
| 171 | 26 / 562 | 26 / 187 | 188 / 562 | 563 | — | — |
| 172 | 4 / 810 | 4 / 279 | 280 / 810 | 811 | 858 / 863 | 881 / 893 |
| 173 | 55 / 459 | 55 / 120 | 121 / 459 | 460 | 1444 / 1449 | 1462 / 1475 |
| 174 | 48 / 248 | 48 / 161 | 162 / 248 | 249 | 283 / 288 | 308 / 321 |
| 175 | 25 / 399 | 25 / 186 | 187 / 399 | 400 | — | — |
| 176 | 10 / 1137 | 10 / 72 | 73 / 1137 | 1138 | 1144 / 1149 | 1162 / 1173 |
| 177 | 72 / 704 | 72 / 161 | 162 / 704 | 705 | 772 / 777 | — |
| 178 | 44 / 505 | 44 / 223 | 224 / 505 | 506 | — | — |
| 179 | 25 / 393 | 25 / 150 | 151 / 393 | 394 | 734 / 739 | 757 / 770 |
| 180 | 58 / 1095 | 58 / 114 | 115 / 1095 | 1096 | — | 1202 / 1213 |
| 181 | 31 / 660 | 31 / 90 | 91 / 660 | 661 | 1288 / 1293 | 1307 / 1318 |
| 182 | 31 / 582 | 31 / 90 | 91 / 582 | 583 | 816 / 821 | 840 / 853 |
| 183 | 15 / 695 | 15 / 80 | 81 / 695 | 696 | 795 / 800 | 814 / 826 |
| 184 | 74 / 295 | 74 / 196 | 197 / 295 | 296 | 545 / 550 | 561 / 571 |
| 185 | 440 / 659 | — | 440 / 659 | — | 601 / 606 | — |
| 186 | 38 / 283 | 38 / 85 | 86 / 283 | 284 | 257 / 262 | — |
| 187 | 121 / 477 | 121 / 288 | 289 / 477 | — | — | — |
| 188 | 2 / 163 | — | 2 / 163 | 164 | 292 / 297 | 310 / 323 |
| 189 | 46 / 675 | 46 / 87 | 88 / 675 | | 1364 / 1369 | 1383 / 1392 |
| 190 | 62 / 385 | — | 62 / 385 | 386 | 974 / 979 | 987 / 999 |
| 191 | 422 / 550 | 422 / 475 | 476 / 550 | 551 | — | 714 / 725 |
| 192 | 124 / 231 | — | 124 / 231 | 232 | — | 387 / 400 |
| 193 | 131 /1053 | 131 / 169 | 170 / 1053 | — | 1019 / 1024 | — |
| 194 | 86 / 403 | 86 / 181 | 182 / 403 | 404 | 1097 / 1102 | 1117 / 1128 |
| 195 | 37 / 162 | 37 / 93 | 94 / 162 | 163 | 224 / 229 | 243 / 254 |
| 196 | 31 / 381 | 31 / 90 | 91 / 381 | 382 | — | 875 / 886 |
| 197 | 46 / 579 | 46 / 156 | 157 / 579 | 580 | — | — |
| 198 | 92 / 471 | 92 / 172 | 173 / 471 | — | 454 / 459 | 458 / 471 |
| 199 | 154 / 675 | 154 / 498 | 499 / 675 | 676 | 819 / 824 | 838 / 849 |
| 200 | 18 / 173 | 18 / 77 | 78 / 173 | 174 | 864 / 869 | 882 / 893 |
| 201 | 17 / 595 | 17 / 85 | 86 / 595 | 596 | 820 / 825 | 840 / 851 |
| 202 | 89 / 334 | 89 / 130 | 131 / 334 | 335 | 462 / 467 | 484 / 495 |
| 203 | 21 / 614 | 21 / 83 | 84 / 614 | 615 | 849 / 854 | 873 / 884 |
| 204 | 94 / 573 | 94 / 258 | 259 / 573 | 574 | 862 / 867 | 886 / 897 |
| 205 | 74 / 397 | 74 / 127 | 128 / 397 | 398 | 472 / 477 | 507 / 518 |
| 206 | 51 / 242 | 51 / 116 | 117 / 242 | 243 | 319 / 324 | 339 / 350 |
| 207 | 111 / 191 | 111/ 155 | 156 / 191 | 192 | 965 / 970 | 986 / 996 |
| 208 | 45 / 602 | 45 / 107 | 108 / 602 | 603 | 828 / 833 | 850 / 860 |
| 209 | 24 / 560 | 24 / 101 | 102 / 560 | 561 | 563 / 568 | 583 / 593 |
| 210 | 109 / 558 | 109/ 273 | 274 / 558 | 559 | — | 1104 / 1114 |
| 211 | 128 / 835 | 128/ 220 | 221 / 835 | 836 | 1145 / 1150 | 1170 / 1181 |
| 212 | 59 / 505 | 59 / 358 | 359 / 505 | 506 | 1042 / 1047 | 1062 / 1073 |
| 213 | 1 / 207 | 1 / 147 | 148 / 207 | 208 | 784 / 789 | 807 / 818 |
| 214 | 12 / 734 | 12 / 101 | 102 / 734 | 735 | 914 / 919 | 961 / 971 |
| 215 | 378 / 518 | 378/ 467 | 468 / 518 | 519 | 607 / 612 | 628 / 640 |
| 216 | 110 / 304 | 110/ 193 | 194 / 304 | 305 | 708 / 713 | 732 / 743 |
| 217 | 201 / 419 | 201/ 272 | 273 / 419 | 420 | 601 / 606 | 627 / 637 |
| 218 | 123 / 302 | 123/ 176 | 177 / 302 | 303 | 1279 / 1284 | 1301 / 1312 |
| 219 | 98 / 673 | 98 / 376 | 377 / 673 | 674 | — | 1025 / 1035 |
| 220 | 17 / 463 | 17 / 232 | 233 / 463 | 464 | 657 / 662 | 684 / 696 |
| 221 | 263 / 481 | 263/ 322 | 323 / 481 | 482 | — | 858 / 868 |
| 222 | 42 / 299 | 42 / 101 | 102 / 299 | 300 | — | 762 / 775 |
| 223 | 198 / 431 | 198/ 260 | 261 / 431 | 432 | — | 1064 / 1074 |
| 224 | 279 / 473 | 279/ 362 | 363 / 473 | 474 | 944 / 949 | 970 / 981 |
| 225 | 12 / 644 | 12 / 92 | 93 / 644 | 645 | 1002 / 1007 | 1020 / 1031 |
| 226 | 91 / 459 | 91 / 330 | 331 / 459 | 460 | — | 1271 / 1281 |
| 227 | 70 / 327 | 70 / 147 | 148 / 327 | 328 | 1741 / 1746 | 1763 / 1774 |
| 228 | 12 / 497 | 12 / 104 | 105 / 497 | 498 | 935 / 940 | 955 / 967 |
| 229 | 90 / 383 | 90 / 200 | 201 / 383 | 384 | 609 / 614 | 632 / 643 |
| 230 | 332 / 541 | 332/ 376 | 377 / 541 | 542 | 739 / 744 | 761 / 773 |
| 231 | 43 / 222 | 43 / 177 | 178 / 222 | 223 | 530 / 535 | 555 / 566 |
| 232 | 115 / 231 | 115/ 180 | 181 / 231 | 232 | 419 / 424 | 445 / 455 |
| 233 | 232 / 384 | 232/ 300 | 301 / 384 | 385 | 650 / 655 | 662 / 673 |
| 234 | 143 / 427 | 143/ 286 | 287 / 427 | 428 | 606 / 611 | 628 / 639 |
| 235 | 284 / 463 | 284/ 379 | 380 / 463 | 464 | — | 762 / 772 |
| 236 | 162 / 671 | 162/ 398 | 399 / 671 | 672 | 805 / 810 | 830 / 840 |
| 237 | 63 / 632 | 63 / 308 | 309 / 632 | 633 | 808 / 813 | 829 / 840 |
| 238 | 21 / 362 | 21 / 200 | 201 / 362 | 363 | 821 / 826 | 838 / 849 |
| 239 | 21 / 503 | 21 / 344 | 345 / 503 | 504 | 1305 / 1310 | 1330 / 1341 |
| 240 | 1 / 201 | 1 / 63 | 64 / 201 | 202 | 637 / 642 | 660 / 671 |
| 241 | 39 / 1034 | 39 / 134 | 135 / 1034 | 1035 | 1566 / 1571 | 1587 / 1597 |
| 242 | 69 / 263 | 69 / 125 | 126 / 263 | 264 | 1173 / 1178 | 1196 / 1205 |
| 243 | 115 / 285 | 115/ 204 | 205 / 285 | 286 | 505 / 510 | 525 / 536 |
| 244 | 90 / 344 | 90 / 140 | 141 / 344 | 345 | 500 / 505 | 515 / 527 |
| 245 | 57 / 311 | 57 / 107 | 108 / 311 | 312 | 467 / 472 | 482 / 493 |
| 246 | 96 / 302 | 96 / 182 | 183 / 302 | 303 | — | 501 / 514 |
| 247 | 161 / 526 | 161/ 328 | 329 / 526 | 527 | — | 799 / 811 |
| 248 | 210 / 332 | 210/ 299 | 300 / 332 | 333 | 594 / 599 | 613 / 625 |
| 249 | 212 / 361 | 212/ 319 | 320 / 361 | 362 | 650 / 655 | 673 / 684 |
| 250 | 75 / 482 | 75 / 128 | 129 / 482 | 483 | 595 / 600 | 618 / 627 |
| 251 | 50 / 631 | 50 / 244 | 245 / 631 | 632 | 777 / 782 | 801 / 812 |
| 252 | 154 / 576 | 154/ 360 | 361 / 576 | 577 | 737 / 742 | 763 / 775 |
| 253 | 154 / 897 | 154/ 360 | 361 / 897 | 898 | 1017 / 1022 | 1044 / 1054 |
| 254 | 146 / 292 | 146/ 253 | 254 / 292 | 293 | 395 / 400 | 433 / 444 |
| 255 | 126 / 383 | 126/ 167 | 168 / 383 | 384 | 726 / 731 | 743 / 754 |
| 256 | 66 / 497 | 66 / 239 | 240 / 497 | 498 | 594 / 599 | 618 / 629 |
| 257 | 49 / 411 | 49 / 96 | 97 / 411 | 412 | 732 / 737 | 750 / 763 |
| 258 | 49 / 534 | 49 / 96 | 97 / 534 | 535 | 593 / 598 | 612 / 623 |
| 259 | 86 / 415 | 86 / 145 | 146 / 415 | 416 | 540 / 545 | 560 / 571 |
| 260 | 56 / 268 | 56 / 100 | 101 / 268 | 269 | 584 / 589 | 601 / 612 |
| 261 | 32 / 328 | 32 / 103 | 104 / 328 | 329 | 508 / 513 | 528 / 539 |
| 262 | 21 / 527 | 21 / 95 | 96 / 527 | 528 | 921 / 926 | 953 / 963 |
| 263 | 147 / 647 | 147/ 374 | 375 / 647 | 648 | — | 668 / 681 |
| 264 | 262 / 471 | 262/ 306 | 307 / 471 | 472 | 663 / 668 | 682 / 693 |
| 265 | 74 / 1216 | 74 / 172 | 173 / 1216 | 1217 | 1627 / 1632 | 1640 / 1652 |
| 266 | 48 / 164 | 48 / 89 | 90 / 164 | 165 | 482 / 487 | 505 / 517 |
| 267 | 185 / 334 | 185/ 295 | 296 / 334 | 335 | 355 / 360 | 392 / 405 |
| 268 | 195 / 347 | 195/ 272 | 273 / 347 | 348 | 1037 / 1042 | 1071 / 1082 |
| 269 | 90 / 815 | 90 / 179 | 180 / 815 | 816 | 883 / 888 | 905 / 916 |
| 270 | 52 / 513 | 52 / 231 | 232 / 513 | 514 | 553 / 558 | 572 / 583 |
| 271 | 172 / 438 | 172/ 354 | 355 / 438 | 439 | 682 / 687 | 685 / 697 |
| 272 | 148 / 366 | 148/ 225 | 226 / 366 | 367 | 770 / 775 | 792 / 803 |
| 273 | 175 / 336 | 17 / 276 | 277 / 336 | 337 | — | 812 / 823 |
| 274 | 191 / 553 | 191/ 304 | 305 / 553 | 554 | 766 / 771 | 804 / 817 |
| 275 | 106 / 603 | 106/ 216 | 217 / 603 | 604 | — | 1102 / 1112 |
| 276 | 47 / 586 | 47 / 124 | 125 / 586 | 587 | 1583 / 1588 | 1614 / 1623 |
| 277 | 99 / 371 | 99 / 290 | 291 / 371 | 372 | 491 / 496 | 513 / 524 |
| 278 | 44 / 814 | 44 / 112 | 113 / 814 | 815 | — | 978 / 989 |
| 279 | 3 / 581 | 3 / 182 | 183 / 581 | 582 | — | 1006 / 1016 |
| 280 | 107 / 427 | 107/ 190 | 191 / 427 | 428 | 499 / 504 | 516 / 529 |
| 281 | 45 / 407 | 45 / 83 | 84 / 407 | 408 | 1008 / 1013 | 1032 / 1042 |
| 282 | 201 / 332 | 201/ 251 | 252 / 332 | 333 | — | 869 / 880 |
| 283 | 217 / 543 | 217/ 255 | 256 / 543 | 544 | — | 1206 / 1217 |
| 284 | 18 / 446 | 18 / 140 | 141 / 446 | 447 | 930 / 935 | 948 / 959 |
| 285 | 29 / 724 | 29 / 118 | 119 / 724 | 725 | 886 / 891 | 910 / 920 |
| 286 | 404 / 586 | 404/ 466 | 467 / 586 | 587 | 1304 / 1309 | 1334 / 1344 |
| 287 | 331 / 432 | 331/ 387 | 388 / 432 | 433 | 548 / 553 | 573 / 585 |
| 288 | 59 / 703 | 59 / 220 | 221 / 703 | 704 | 886 / 891 | 903 / 914 |
| 289 | 672 / 752 | 672/ 722 | 723 / 752 | 753 | — | 1150 / 1161 |
| 290 | 57 / 311 | 57 / 128 | 129 / 311 | 312 | 332 / 337 | 351 / 363 |
| 291 | 80 / 232 | 80 / 127 | 128 / 232 | 233 | 617 / 622 | 634 / 645 |
| 292 | 91 / 291 | 91 / 219 | 220 / 291 | 292 | 367 / 372 | 389 / 400 |
| 293 | 196 / 384 | 196/ 240 | 241 / 384 | 385 | 461 / 466 | 485 / 496 |
| 294 | 54 / 590 | 54 / 227 | 228 / 590 | 591 | — | 955 / 965 |
| 295 | 133 / 846 | 133/ 345 | 346 / 846 | 847 | — | 890 / 901 |
| 296 | 138 / 671 | 138/ 248 | 249 / 671 | 672 | 1319 / 1324 | 1338 / 1347 |
| 297 | 124 / 411 | 124/ 186 | 187 / 411 | 412 | 948 / 953 | 971 / 983 |
| 298 | 372 / 494 | 372/ 443 | 444 / 494 | 495 | 708 / 713 | 732 / 745 |
| 299 | 112 / 450 | 112/ 192 | 193 / 450 | 451 | 1053 / 1058 | 1095 / 1106 |
| 300 | 117 / 866 | 117/ 170 | 171 / 866 | 867 | 1159 / 1164 | 1178 / 1190 |
| 301 | 13 / 465 | 13 / 75 | 76 / 465 | 466 | 1035 / 1040 | 1060 / 1070 |
| 302 | 2 / 718 | 2 / 76 | 77 / 718 | 719 | 1170 / 1175 | 1203 / 1213 |
| 303 | 86 / 709 | 86 / 361 | 362 / 709 | 710 | 943 / 948 | 963 / 973 |
| 304 | 63 / 320 | 63 / 179 | 180 / 320 | 321 | 771 / 776 | 799 / 810 |
| 305 | 299 / 418 | 299/ 379 | 380 / 418 | 419 | 739 / 744 | 762 / 771 |
| 306 | 186 / 380 | 186/ 233 | 234 / 380 | 381 | 383 / 388 | 396 / 409 |
| 307 | 69 / 458 | 69 / 233 | 234 / 458 | 459 | 564 / 569 | 602 / 613 |
| 308 | 12 / 638 | 12 / 263 | 264 / 638 | 639 | 951 / 956 | 975 / 985 |
| 309 | 282 / 389 | 282/ 332 | 333 / 389 | 390 | 1413 / 1418 | 1437 / 1447 |
| 310 | 208 / 339 | 208/ 294 | 295 / 339 | 340 | — | 1631 / 1641 |
| 311 | 69 / 557 | 69 / 224 | 225 / 557 | 558 | 849 / 854 | 870 / 883 |
| 312 | 134 / 325 | 134/ 274 | 275 / 325 | 326 | — | 718 / 729 |
| 313 | 78 / 731 | 78 / 227 | 228 / 731 | 732 | — | 1002 / 1013 |
| 314 | 46 / 693 | 46 / 90 | 91 / 693 | 694 | 937 / 942 | 962 / 973 |
| 315 | 126 / 527 | 126/ 182 | 183 / 527 | 528 | 834 / 839 | 856 / 867 |
| 316 | 66 / 320 | 66 / 113 | 114 / 320 | 321 | 490 / 495 | 508 / 519 |
| 317 | 73 / 948 | 73 / 159 | 160 / 948 | 949 | — | 1016 / 1028 |
| 318 | 69 / 434 | 69 / 236 | 237 / 434 | 435 | 419 / 424 | 441 / 452 |
| 319 | 628 / 804 | 628/ 711 | 712 / 804 | 805 | — | 864 / 875 |
| 320 | 70 / 366 | 70 / 108 | 109 / 366 | 367 | 496 / 501 | 521 / 531 |
| 321 | 70 / 366 | 70 / 108 | 109 / 366 | 367 | — | 1233 / 1244 |
| 322 | 111 / 434 | 111/ 185 | 186 / 434 | 435 | — | 618 / 631 |
| 323 | 19 / 567 | 19 / 63 | 64 / 567 | 568 | 749 / 754 | 771 / 781 |
| 324 | 19 / 312 | 19 / 63 | 64 / 312 | 313 | 896 / 901 | 921 / 931 |
| 325 | 64 / 612 | 64 / 234 | 235 / 612 | 613 | — | 839 / 849 |
| 326 | 39 / 458 | 39 / 80 | 81 / 458 | 459 | 613 / 618 | 633 / 644 |
| 327 | 9 / 185 | 9 / 50 | 51 / 185 | 186 | — | 906 / 918 |
| 328 | 14 / 316 | 14 / 121 | 122 / 316 | 317 | 442 / 447 | 458 / 471 |
| 329 | 70 / 1092 | 70 / 234 | 235 / 1092 | 1093 | 1475 / 1480 | 1493 / 1504 |
| 330 | 274 / 597 | 274/ 399 | 400 / 597 | 598 | 731 / 736 | 754 / 765 |
| 331 | 230 / 469 | 230/ 307 | 308 / 469 | 470 | 1004 / 1009 | 1027 / 1040 |
| 332 | 72 / 545 | 72 / 203 | 204 / 545 | 546 | — | 1151 / 1162 |
| 333 | 36 / 425 | 36 / 119 | 120 / 425 | 426 | 1215 / 1220 | 1240 / 1250 |
| 334 | 155 / 751 | 155/ 340 | 341 / 751 | 752 | 912 / 917 | 937 / 947 |
| 335 | 46 / 585 | 46 / 120 | 121 / 585 | 586 | 584 / 589 | 606 / 619 |
| 336 | 35 / 568 | 35 / 100 | 101 / 568 | 569 | 667 / 672 | 685 / 699 |
| 337 | 68 / 337 | 68 / 124 | 125 / 337 | 338 | 462 / 467 | 482 / 497 |
| 338 | 39 / 413 | 39 / 83 | 84 / 413 | 414 | 566 / 571 | 583 / 598 |
| 339 | 235 / 642 | 235 / 336 | 337 / 642 | 643 | 1540 / 1545 | 1564 / 1579 |
| 340 | 42 / 755 | 42 / 200 | 201 / 755 | 756 | 860 / 865 | 878 / 893 |
| 341 | 23 / 340 | 23 / 235 | 236 / 340 | 341 | 611 / 616 | 629 / 644 |
| 342 | 12 / 380 | 12 / 263 | 264 / 380 | 381 | — | 523 / 538 |
| 343 | 8 / 232 | 8 / 154 | 155 / 232 | 233 | — | 737 / 752 |
| 344 | 183 / 422 | 183 / 302 | 303 / 422 | 423 | 505 / 510 | 523 / 537 |
| 345 | 24 / 1004 | 24 / 170 | 171 / 1004 | 1005 | — | 1586 / 1602 |
| 346 | 80 / 784 | 80 / 139 | 140 / 784 | 785 | 910 / 915 | 933 / 948 |
| 347 | 67 / 222 | 67 / 159 | 160 / 222 | 223 | — | 673 / 687 |
| 348 | 46 / 732 | 46 / 186 | 187 / 732 | 733 | 781 / 786 | 806 / 821 |
| 349 | 81 / 356 | 81 / 152 | 153 / 356 | 357 | 406 / 411 | 429 / 445 |
| 350 | 72 / 1346 | 72 / 140 | 141 / 1346 | 1347 | 1482 / 1487 | 1502 / 1517 |
| 351 | 194 / 454 | 194 / 379 | 380 / 454 | 455 | — | 1545 / 1560 |
| 352 | 48 / 494 | 48 / 347 | 348 / 494 | 495 | 1031 / 1036 | 1051 / 1066 |
| 353 | 111 / 671 | 111 / 215 | 216 / 671 | 672 | 990 / 995 | 1045 / 1061 |
| 354 | 5 / 373 | 5 / 82 | 83 / 373 | 374 | 1986 / 1991 | 2010 / 2025 |
| 355 | 14 / 472 | 14 / 319 | 320 / 472 | 473 | 555 / 560 | 576 / 591 |
| 356 | 2 / 217 | — | 2 / 217 | 218 | 489 / 494 | 529 / 544 |
| 357 | 51 / 575 | 51 / 110 | 111 / 575 | 576 | 1653 / 1658 | 1674 / 1689 |
| 358 | 69 / 977 | 69 / 128 | 129 / 977 | 978 | 1076 / 1081 | 1096 / 1111 |
| 359 | 44 / 238 | 44 / 160 | 161 / 238 | 239 | 443 / 448 | 540 / 554 |
| 360 | 114 / 524 | 114 / 164 | 165 / 524 | 525 | 1739 / 1744 | 1758 / 1773 |
| 361 | 26 / 487 | 26 / 64 | 65 / 487 | 488 | 883 / 888 | 901 / 917 |
| 362 | 80 / 388 | 80 / 187 | 188 / 388 | 389 | 609 / 614 | 627 / 641 |
| 363 | 186 / 443 | 186 / 407 | 408 / 443 | 444 | 827 / 832 | 839 / 854 |
| 364 | 75 / 1259 | 75 / 1004 | 1005 / 1259 | 1260 | 1536 / 1541 | 1553 / 1568 |
| 365 | 98 / 376 | 98 / 151 | 152 / 376 | 377 | 471 / 476 | 491 / 506 |
| 366 | 72 / 254 | 72 / 134 | 135 / 254 | 255 | 506 / 511 | 528 / 542 |
| 367 | 148 / 1140 | 148 / 240 | 241 / 1140 | 1141 | 1590 / 1595 | 1614 / 1629 |
| 368 | 109 / 738 | 109 / 405 | 406 / 738 | 739 | 1633 / 1638 | 1650 / 1665 |
| 369 | 55 / 291 | 55 / 255 | 256 / 291 | 292 | 390 / 395 | 410 / 425 |
| 370 | 25 / 276 | — | 25 / 276 | 277 | 508 / 513 | 533 / 546 |
| 371 | 32 / 307 | 32 / 91 | 92 / 307 | 308 | 452 / 457 | 472 / 485 |
| 372 | 46 / 675 | 46 / 87 | 88 / 675 | 676 | 1363 / 1368 | 1382 / 1394 |
| 373 | 329 / 943 | 329 / 745 | 746 / 943 | 944 | — | 1322 / 1333 |
| 374 | 27 / 281 | 27 / 77 | 78 / 281 | 282 | — | — |
| 375 | 61 / 405 | 61 / 213 | 214 / 405 | 406 | 675 / 680 | 692 / 703 |
| 376 | 137 / 379 | 137 / 229 | 230 / 379 | 380 | 728 / 733 | 755 / 768 |
| 377 | 37 / 741 | 37 / 153 | 154 / 741 | 742 | 969 / 974 | 994 / 1007 |
| 378 | 80 / 265 | 80 / 142 | 143 / 265 | 266 | 491 / 496 | 517 / 527 |
| 379 | 612 / 644 | — | 612 / 644 | 645 | 829 / 834 | 850 / 861 |
| 380 | 61 / 228 | 61 / 162 | 163 / 228 | 229 | 208 / 213 | — |
| 381 | 15 / 311 | 15 / 110 | 111 / 311 | 312 | 507 / 512 | 531 / 542 |
| 382 | 50 / 529 | 50 / 130 | 131 / 529 | 530 | 877 / 882 | 899 / 909 |
| 383 | 240 / 416 | 240 / 305 | 306 / 416 | 417 | 1117 / 1122 | 1139 / 1149 |
| 384 | 111 / 446 | 111 / 254 | 255 / 446 | 447 | 890 / 895 | 909 / 921 |
| 385 | 123 / 455 | 123 / 290 | 291 / 455 | 456 | 886 / 891 | 904 / 916 |
| 386 | 2 / 433 | 2 / 232 | 233 / 433 | 434 | 488 / 493 | 510 / 520 |
| 387 | 34 / 363 | 34 / 87 | 88 / 363 | 364 | 536 / 541 | 558 / 568 |
| 388 | 50 / 286 | 50 / 157 | 158 / 286 | 287 | 385 / 390 | 405 / 416 |
| 389 | 50 / 637 | 50 / 151 | 152 / 637 | 638 | — | 1277 / 1289 |
| 390 | 72 / 602 | 72 / 125 | 126 / 602 | 603 | — | 704 / 715 |
| 391 | 120 / 434 | 120 / 185 | 186 / 434 | 435 | 899 / 904 | 918 / 931 |
| 392 | 4 / 447 | 4 / 147 | 148 / 447 | 448 | 858 / 863 | 880 / 891 |
| 393 | 28 / 804 | 28 / 96 | 97 / 804 | 805 | — | 806 / 817 |
| 394 | 27 / 359 | 27 / 212 | 213 / 359 | 360 | 988 / 993 | 1009 / 1020 |
| 395 | 25 / 957 | 25 / 93 | 94 / 957 | 958 | 1368 / 1373 | 1388 / 1399 |
| 396 | 47 / 319 | 47 / 226 | 227 / 319 | 320 | — | 656 / 666 |
| 397 | 80 / 940 | 80 / 130 | 131 / 940 | 941 | 1101 / 1106 | 1119 / 1130 |
| 398 | 146 / 457 | 146 / 292 | 293 / 457 | 458 | 442 / 447 | 465 / 475 |
| 399 | 100 / 351 | 100 / 207 | 208 / 351 | 352 | — | 940 / 949 |
| 400 | 177 / 569 | 177 / 236 | 237 / 569 | 570 | — | 931 / 939 |
| 401 | 67 / 459 | 67 / 135 | 136 / 459 | 460 | 856 / 861 | 875 / 887 |
| 402 | 65 / 1069 | 65 / 112 | 113 / 1069 | 1070 | 1978 / 1983 | 1999 / 2010 |
| 403 | 70 / 321 | 70 / 234 | 235 / 321 | 322 | 364 / 369 | 375 / 387 |
| 404 | 38 / 877 | 38 / 91 | 92 / 877 | 878 | 947 / 952 | 974 / 983 |
| 405 | 51 / 470 | 51 / 203 | 204 / 470 | 471 | 1585 / 1590 | 1604 / 1614 |

[0997] TABLE II

| | Full Length | Signal | Mature |
|---|---|---|---|
| | Polypeptide | Peptide | Polypeptide |
| Seq Id No | Location | Location | Location |
| 406 | −26 / 299 | −26 / −1 | 1 / 299 |
| 407 | −18 / 284 | −18 / −1 | 1 / 284 |
| 408 | −15 / 234 | −15 / −1 | 1 / 234 |
| 409 | 1 / 84 | — | 1 / 84 |
| 410 | −13 / 541 | −13 / −1 | 1 / 541 |
| 411 | −48 / 51 | −48 / −1 | 1 / 51 |
| 412 | −32 / 58 | −32 / −1 | 1 / 58 |
| 413 | −46 / 69 | −46 / −1 | 1 / 69 |
| 414 | −19 / 47 | −19 / −1 | 1 / 47 |
| 415 | −21 / 112 | −21 / −1 | 1 / 112 |
| 416 | −70 / 70 | −70 / −1 | 1 / 70 |
| 417 | −32 / 201 | −32 / −1 | 1 / 201 |
| 418 | −29 / 54 | −29 / −1 | 1 / 54 |
| 419 | −41 / 174 | −41 / −1 | 1 / 174 |
| 420 | −20 / 397 | −20 / −1 | 1 / 397 |
| 421 | −23 / 343 | −23 / −1 | 1 / 343 |
| 422 | −45 / 105 | −45 / −1 | 1 / 105 |
| 423 | −68 / 240 | −68 / −1 | 1 / 240 |
| 424 | −49 / 65 | −49 / −1 | 1 / 65 |
| 425 | −15 / 367 | −15 / −1 | 1 / 367 |
| 426 | −197 / 15 | −197 / −1 | 1 / 15 |
| 427 | −26 / 261 | −26 / −1 | 1 / 261 |
| 428 | −25 / 287 | −25 / −1 | 1 / 287 |
| 429 | −29 / 197 | −29 / −1 | 1 / 197 |
| 430 | −35 / 371 | −35 / −1 | 1 / 371 |
| 431 | −57 / 63 | −57 / −1 | 1 / 63 |
| 432 | −36 / 174 | −36 / −1 | 1 / 174 |
| 433 | −243 / 8 | −243 / −1 | 1 / 8 |
| 434 | −24 / 102 | −24 / −1 | 1 / 102 |
| 435 | −44 / 89 | −44 / −1 | 1 / 89 |
| 436 | −28 / 193 | −28 / −1 | 1 / 193 |
| 437 | −23 / 329 | −23 / −1 | 1 / 329 |
| 438 | −184 / 201 | −184 / −1 | 1 / 201 |
| 439 | −23 / 46 | −23 / −1 | 1 / 46 |
| 440 | −49 / 59 | −49 / −1 | 1 / 59 |
| 441 | −28 / 80 | −28 / −1 | 1 / 80 |
| 442 | −37 / 88 | −37 / −1 | 1 / 88 |
| 443 | −88 / 81 | −88 / −1 | 1 / 81 |
| 444 | −56 / 26 | −56 / −1 | 1 / 26 |
| 445 | −20 / 231 | −20 / −1 | 1 / 231 |
| 446 | −34 / 271 | −34 / −1 | 1 / 271 |
| 447 | −42 / 19 | −42 / −1 | 1 / 19 |
| 448 | −15 / 98 | −15 / −1 | 1 / 98 |
| 449 | −30 / 71 | −30 / −1 | 1 / 71 |
| 450 | −90 / 7 | −90 / −1 | 1 / 7 |
| 451 | −25 / 76 | −25 / −1 | 1 / 76 |
| 452 | −101 / 51 | −101 / −1 | 1 / 51 |
| 453 | −86 / 123 | −86 / −1 | 1 / 123 |
| 454 | −21 / 68 | −21 / −1 | 1 / 68 |
| 455 | −19 / 47 | −19 / −1 | 1 / 47 |
| 693 | −13 / 291 | −13 / −1 | 1 / 291 |
| 694 | 1 / 59 | — | 1 / 59 |
| 695 | −28 / 69 | −28 / −1 | 1 / 69 |
| 696 | −32 / 20 | −32 / −1 | 1 / 20 |
| 697 | −97 / 27 | −97 / −1 | 1 / 27 |
| 698 | −24 / 206 | −24 / −1 | 1 / 206 |
| 699 | −32 / 40 | −32 / −1 | 1 / 40 |
| 700 | −33 / 55 | −33 / −1 | 1 / 55 |
| 701 | −32 / 74 | −32 / −1 | 1 / 74 |
| 702 | −21 / 246 | −21 / −1 | 1 / 246 |
| 703 | 1 / 108 | — | 1 / 108 |
| 704 | −46 / 23 | −46 / −1 | 1 / 23 |
| 705 | −28 / 223 | −28 / −1 | 1 / 223 |
| 706 | −48 / 51 | −48 / −1 | 1 / 51 |
| 707 | −31 / 50 | −31 / −1 | 1 / 50 |
| 708 | 1 / 147 | — | 1 / 147 |
| 709 | −45 / 228 | −45 / −1 | 1 / 228 |
| 710 | −37 / 373 | −37 / −1 | 1 / 373 |
| 711 | −19 / 374 | −19 / −1 | 1 / 374 |
| 712 | −13 / 368 | −13 / −1 | 1 / 368 |
| 713 | −42 / 249 | −42 / −1 | 1 / 249 |
| 714 | 1 / 92 | — | 1 / 92 |
| 715 | −63 / 64 | −63 / −1 | 1 / 64 |
| 716 | −20 / 64 | −20 / −1 | 1 / 64 |
| 717 | −20 / 162 | −20 / −1 | 1 / 162 |
| 718 | −25 / 46 | −25 / −1 | 1 / 46 |
| 719 | 1 / 73 | — | 1 / 73 |
| 720 | −150 / 19 | −150 / −1 | 1 / 19 |
| 721 | −22 / 54 | −22 / −1 | 1 / 54 |
| 722 | −54 / 41 | −54 / −1 | 1 / 41 |
| 723 | −22 / 66 | −22 / −1 | 1 / 66 |
| 724 | −16 / 73 | −16 / −1 | 1 / 73 |
| 725 | 1 / 109 | — | 1 / 109 |
| 726 | −103 / 11 | −103 / −1 | 1 / 11 |
| 727 | −97 / 27 | −97 / −1 | 1 / 27 |
| 728 | −22 / 71 | −22 / −1 | 1 / 71 |
| 729 | −42 / 165 | −42 / −1 | 1 / 165 |
| 730 | 1 / 59 | — | 1 / 59 |
| 731 | −27 / 29 | −27 / −1 | 1 / 29 |
| 732 | −94 / 68 | −94 / −1 | 1 / 68 |
| 733 | −68 / 86 | −68 / −1 | 1 / 86 |
| 734 | 1 / 99 | — | 1 / 99 |
| 735 | −24 / 19 | −24 / −1 | 1 / 19 |
| 736 | −21 / 48 | −21 / −1 | 1 / 48 |
| 737 | −18 / 60 | −18 / −1 | 1 / 60 |
| 738 | −47 / 33 | −47 / −1 | 1 / 33 |
| 739 | −103 / 138 | −103 / −1 | 1 / 138 |
| 456 | −31 / 124 | −31 / −1 | 1 / 124 |
| 456 | −31 / 124 | −31 / −1 | 1 / 124 |
| 457 | 1 / 55 | — | 1 / 55 |
| 458 | −20 / 47 | −20 / −1 | 1 / 47 |
| 459 | −21 / 177 | −21 / −1 | 1 / 177 |
| 460 | −25 / 110 | −25 / −1 | 1 / 110 |
| 461 | −70 / 185 | −70 / −1 | 1 / 185 |
| 462 | −49 / 10 | −49 / −1 | 1 / 10 |
| 463 | 1 / 180 | — | 1 / 180 |
| 464 | −23 / 139 | −23 / −1 | 1 / 139 |
| 465 | −23 / 97 | −23 / −1 | 1 / 97 |
| 466 | 1 / 7 | — | 1 / 7 |
| 467 | −42 / 157 | −42 / −1 | 1 / 157 |
| 468 | 1 / 43 | — | 1 / 43 |
| 469 | −37 / 13 | −37 / −1 | 1 / 13 |
| 470 | 1 / 153 | — | 1 / 153 |
| 471 | 1 / 67 | — | 1 / 67 |
| 472 | 1 / 87 | — | 1 / 87 |
| 473 | −85 / 165 | −85 / −1 | 1 / 165 |
| 474 | 1 / 24 | — | 1 / 24 |
| 475 | 1 / 228 | — | 1 / 228 |
| 476 | −20 / 66 | −20 / −1 | 1 / 66 |
| 477 | 1 / 44 | — | 1 / 44 |
| 478 | −58 / 256 | −58 / −1 | 1 / 256 |
| 479 | −80 / 9 | −80 / −1 | 1 / 9 |
| 480 | −15 / 83 | −15 / −1 | 1 / 83 |
| 481 | −36 / 56 | −36 / −1 | 1 / 56 |
| 482 | −16 / 335 | −16 / −1 | 1 / 335 |
| 483 | −47 / 91 | −47 / −1 | 1 / 91 |
| 484 | −73 / 28 | −73 / −1 | 1 / 28 |
| 485 | −68 / 184 | −68 / −1 | 1 / 184 |
| 486 | −68 / 282 | −68 / −1 | 1 / 282 |
| 487 | −68 / 322 | −68 / −1 | 1 / 322 |
| 488 | −82 / 108 | −82 / −1 | 1 / 108 |
| 489 | −232 / 53 | −232 / −1 | 1 / 53 |
| 490 | 1 / 153 | — | 1 / 153 |
| 491 | 1 / 49 | — | 1 / 49 |
| 492 | −24 / 75 | −24 / −1 | 1 / 75 |
| 493 | −37 / 58 | −37 / −1 | 1 / 58 |
| 494 | −23 / 98 | −23 / −1 | 1 / 98 |
| 495 | 1 / 59 | — | 1 / 59 |
| 496 | −14 / 72 | −14 / −1 | 1 / 72 |
| 497 | −58 / 107 | −58 / −1 | 1 / 107 |
| 498 | −35 / 45 | −35 / −1 | 1 / 45 |
| 499 | −21 / 52 | −21 / −1 | 1 / 52 |
| 500 | 1 / 98 | — | 1 / 98 |
| 501 | −21 / 91 | −21 / −1 | 1 / 91 |
| 502 | −44 / 26 | −44 / −1 | 1 / 26 |
| 503 | −13 / 79 | −13 / −1 | 1 / 79 |
| 504 | −42 / 165 | −42 / −1 | 1 / 165 |
| 505 | 1 / 201 | — | 1 / 201 |
| 506 | −37 / 342 | −37 / −1 | 1 / 342 |
| 507 | 1 / 112 | — | 1 / 112 |
| 508 | 1 / 43 | — | 1 / 43 |
| 509 | −16 / 35 | −16 / −1 | 1 / 35 |
| 510 | −18 / 226 | −18 / −1 | 1 / 226 |
| 511 | −34 / 319 | −34 / −1 | 1 / 319 |
| 512 | 1 / 30 | — | 1 / 30 |
| 513 | −48 / 64 | −48 / −1 | 1 / 64 |
| 514 | 1 / 54 | — | 1 / 54 |
| 515 | −21 / 130 | −21 / −1 | 1 / 130 |
| 516 | −25 / 203 | −25 / −1 | 1 / 203 |
| 517 | −47 / 17 | −47 / −1 | 1 / 17 |
| 518 | −31 / 115 | −31 / −1 | 1 / 115 |
| 519 | 1 / 87 | — | 1 / 87 |
| 520 | −27 / 13 | −27 / −1 | 1 / 13 |
| 521 | 1 / 154 | — | 1 / 154 |
| 522 | 1 / 101 | — | 1 / 101 |
| 523 | −22 / 434 | −22 / −1 | 1 / 434 |
| 524 | −17 / 81 | −17 / −1 | 1 / 81 |
| 525 | −29 / 54 | −29 / −1 | 1 / 54 |
| 526 | −23 / 206 | −23 / −1 | 1 / 206 |
| 527 | −21 / 131 | −21 / −1 | 1 / 131 |
| 528 | −54 / 125 | −54 / −1 | 1 / 125 |
| 529 | −92 / 177 | −92 / −1 | 1 / 177 |
| 530 | −22 / 113 | −22 / −1 | 1 / 113 |
| 531 | −38 / 29 | −38 / −1 | 1 / 29 |
| 532 | −54 / 71 | −54 / −1 | 1 / 71 |
| 533 | −21 / 355 | −21 / −1 | 1 / 355 |
| 534 | −30 / 181 | −30 / −1 | 1 / 181 |
| 535 | −60 / 94 | −60 / −1 | 1 / 94 |
| 536 | −42 / 81 | −42 / −1 | 1 / 81 |
| 537 | −19 / 327 | −19 / −1 | 1 / 327 |
| 538 | −20 / 190 | −20 / −1 | 1 / 190 |
| 539 | −20 / 164 | −20 / −1 | 1 / 164 |
| 540 | −22 / 205 | −22 / −1 | 1 / 205 |
| 541 | −41 / 33 | −41 / −1 | 1 / 33 |
| 542 | 1 / 73 | — | 1 / 73 |
| 543 | −16 / 66 | −16 / −1 | 1 / 66 |
| 544 | −56 / 63 | −56 / −1 | 1 / 63 |
| 545 | 1 / 54 | — | 1 / 54 |
| 546 | −14 / 196 | −14 / −1 | 1 / 196 |
| 547 | 1 / 108 | — | 1 / 108 |
| 548 | −18 / 25 | −18 / −1 | 1 / 25 |
| 549 | 1 / 36 | — | 1 / 36 |
| 550 | −13 / 294 | −13 / −1 | 1 / 294 |
| 551 | −32 / 74 | −32 / −1 | 1 / 74 |
| 552 | −19 / 23 | −19 / −1 | 1 / 23 |
| 553 | −20 / 97 | −20 / −1 | 1 / 97 |
| 554 | −37 / 141 | −37 / −1 | 1 / 141 |
| 555 | −27 / 99 | −27 / −1 | 1 / 99 |
| 556 | −115 / 59 | −115 / −1 | 1 / 59 |
| 557 | −20 / 32 | −20 / −1 | 1 / 32 |
| 558 | −23 / 170 | −23 / −1 | 1 / 170 |
| 559 | −14 / 68 | −14 / −1 | 1 / 68 |
| 560 | −21 / 177 | −21 / −1 | 1 / 177 |
| 561 | −55 / 105 | −55 / −1 | 1 / 105 |
| 562 | −18 / 90 | −18 / −1 | 1 / 90 |
| 563 | −22 / 42 | −22 / −1 | 1 / 42 |
| 564 | −15 / 12 | −15 / −1 | 1 / 12 |
| 565 | −21 / 165 | −21 / −1 | 1 / 165 |
| 566 | −26 / 153 | −26 / −1 | 1 / 153 |
| 567 | −55 / 95 | −55 / −1 | 1 / 95 |
| 568 | −31 / 205 | −31 / −1 | 1 / 205 |
| 569 | −100 / 49 | −100 / −1 | 1 / 49 |
| 570 | −49 / 20 | −49 / −1 | 1 / 20 |
| 571 | −30 / 211 | −30 / −1 | 1 / 211 |
| 572 | −30 / 17 | −30 / −1 | 1 / 17 |
| 573 | −28 / 37 | −28 / −1 | 1 / 37 |
| 574 | −24 / 49 | −24 / −1 | 1 / 49 |
| 575 | −18 / 42 | −18 / −1 | 1 / 42 |
| 576 | −93 / 99 | −93 / −1 | 1 / 99 |
| 577 | −72 / 77 | −72 / −1 | 1 / 77 |
| 578 | −20 / 53 | −20 / −1 | 1 / 53 |
| 579 | −20 / 66 | −20 / −1 | 1 / 66 |
| 580 | −21 / 57 | −21 / −1 | 1 / 57 |
| 581 | −28 / 37 | −28 / −1 | 1 / 37 |
| 582 | −27 / 184 | −27 / −1 | 1 / 184 |
| 583 | −80 / 43 | −80 / −1 | 1 / 43 |
| 584 | −26 / 60 | −26 / −1 | 1 / 60 |
| 585 | −31 / 131 | −31 / −1 | 1 / 131 |
| 586 | −37 / 61 | −37 / −1 | 1 / 61 |
| 587 | −15 / 55 | −15 / −1 | 1 / 55 |
| 588 | −45 / 15 | −45 / −1 | 1 / 15 |
| 589 | −22 / 17 | −22 / −1 | 1 / 17 |
| 590 | −23 / 28 | −23 / −1 | 1 / 28 |
| 591 | −48 / 47 | −48 / −1 | 1 / 47 |
| 592 | −32 / 28 | −32 / −1 | 1 / 28 |
| 593 | −79 / 91 | −79 / −1 | 1 / 91 |
| 594 | −82 / 108 | −82 / −1 | 1 / 108 |
| 595 | −60 / 54 | −60 / −1 | 1 / 54 |
| 596 | −108 / 53 | −108 / −1 | 1 / 53 |
| 597 | −21 / 46 | −21 / −1 | 1 / 46 |
| 598 | −32 / 300 | −32 / −1 | 1 / 300 |
| 599 | −19 / 46 | −19 / −1 | 1 / 46 |
| 600 | −30 / 27 | −30 / −1 | 1 / 27 |
| 601 | −17 / 68 | −17 / −1 | 1 / 68 |
| 602 | −17 / 68 | −17 / −1 | 1 / 68 |
| 603 | −29 / 40 | −29 / −1 | 1 / 40 |
| 604 | −56 / 66 | −56 / −1 | 1 / 66 |
| 605 | −30 / 11 | −30 / −1 | 1 / 11 |
| 606 | −36 / 14 | −36 / −1 | 1 / 14 |
| 607 | −18 / 118 | −18 / −1 | 1 / 118 |
| 608 | −65 / 129 | −65 / −1 | 1 / 129 |
| 609 | −69 / 72 | −69 / −1 | 1 / 72 |
| 610 | −69 / 179 | −69 / −1 | 1 / 179 |
| 611 | −36 / 13 | −36 / −1 | 1 / 13 |
| 612 | −14 / 72 | −14 / −1 | 1 / 72 |
| 613 | −58 / 86 | −58 / −1 | 1 / 86 |
| 614 | −16 / 105 | −16 / −1 | 1 / 105 |
| 615 | −16 / 146 | −16 / −1 | 1 / 146 |
| 616 | −20 / 90 | −20 / −1 | 1 / 90 |
| 617 | −15 / 56 | −15 / −1 | 1 / 56 |
| 618 | −24 / 75 | −24 / −1 | 1 / 75 |
| 619 | −25 / 144 | −25 / −1 | 1 / 144 |
| 620 | −76 / 91 | −76 / −1 | 1 / 91 |
| 621 | −15 / 55 | −15 / −1 | 1 / 55 |
| 622 | −33 / 348 | −33 / −1 | 1 / 348 |
| 623 | −14 / 25 | −14 / −1 | 1 / 25 |
| 624 | −37 / 13 | −37 / −1 | 1 / 13 |
| 625 | −26 / 25 | −26 / −1 | 1 / 25 |
| 626 | −30 / 212 | −30 / −1 | 1 / 212 |
| 627 | −60 / 94 | −60 / −1 | 1 / 94 |
| 628 | −61 / 28 | −61 / −1 | 1 / 28 |
| 629 | −26 / 47 | −26 / −1 | 1 / 47 |
| 630 | −34 / 20 | −34 / −1 | 1 / 20 |
| 631 | −38 / 83 | −38 / −1 | 1 / 83 |
| 632 | −37 / 129 | −37 / −1 | 1 / 129 |
| 633 | −26 / 154 | −26 / −1 | 1 / 154 |
| 634 | −64 / 27 | −64 / −1 | 1 / 27 |
| 635 | −23 / 234 | −23 / −1 | 1 / 234 |
| 636 | −60 / 133 | −60 / −1 | 1 / 133 |
| 637 | −28 / 79 | −28 / −1 | 1 / 79 |
| 638 | −13 / 108 | −13 / −1 | 1 / 108 |
| 639 | −17 / 27 | −17 / −1 | 1 / 27 |
| 640 | −13 / 96 | −13 / −1 | 1 / 96 |
| 641 | −41 / 102 | −41 / −1 | 1 / 102 |
| 642 | −30 / 202 | −30 / −1 | 1 / 202 |
| 643 | −21 / 40 | −21 / −1 | 1 / 40 |
| 644 | −19 / 15 | −19 / −1 | 1 / 15 |
| 645 | −54 / 161 | −54 / −1 | 1 / 161 |
| 646 | −17 / 10 | −17 / −1 | 1 / 10 |
| 647 | −24 / 61 | −24 / −1 | 1 / 61 |
| 648 | −16 / 35 | −16 / −1 | 1 / 35 |
| 649 | −43 / 24 | −43 / −1 | 1 / 24 |
| 650 | −15 / 48 | −15 / −1 | 1 / 48 |
| 651 | −58 / 121 | −58 / −1 | 1 / 121 |
| 652 | −71 / 167 | −71 / −1 | 1 / 167 |
| 653 | −37 / 141 | −37 / −1 | 1 / 141 |
| 654 | −21 / 75 | −21 / −1 | 1 / 75 |
| 655 | −24 / 17 | −24 / −1 | 1 / 17 |
| 656 | −27 / 86 | −27 / −1 | 1 / 86 |
| 657 | −18 / 232 | −18 / −1 | 1 / 232 |
| 658 | −21 / 130 | −21 / −1 | 1 / 130 |
| 659 | −25 / 214 | −25 / −1 | 1 / 214 |
| 660 | −92 / 116 | −92 / −1 | 1 / 116 |
| 661 | −39 / 47 | −39 / −1 | 1 / 47 |
| 662 | −27 / 13 | −27 / −1 | 1 / 13 |
| 663 | −16 / 49 | −16 / −1 | 1 / 49 |
| 664 | −55 / 75 | −55 / −1 | 1 / 75 |
| 665 | −84 / 125 | −84 / −1 | 1 / 125 |
| 666 | −17 / 19 | −17 / −1 | 1 / 19 |
| 667 | −29 / 15 | −29 / −1 | 1 / 15 |
| 668 | −52 / 111 | −52 / −1 | 1 / 111 |
| 669 | −47 / 17 | −47 / −1 | 1 / 17 |
| 670 | −50 / 168 | −50 / −1 | 1 / 168 |
| 671 | −15 / 201 | −15 / −1 | 1 / 201 |
| 672 | −19 / 115 | −19 / −1 | 1 / 115 |
| 673 | −16 / 69 | −16 / −1 | 1 / 69 |
| 674 | −29 / 263 | −29 / −1 | 1 / 263 |
| 675 | −56 / 66 | −56 / −1 | 1 / 66 |
| 676 | −28 / 31 | −28 / −1 | 1 / 31 |
| 677 | −13 / 86 | −13 / −1 | 1 / 86 |
| 678 | −13 / 86 | −13 / −1 | 1 / 86 |
| 679 | −25 / 83 | −25 / −1 | 1 / 83 |
| 680 | −15 / 168 | −15 / −1 | 1 / 168 |
| 681 | −15 / 83 | −15 / −1 | 1 / 83 |
| 682 | −57 / 126 | −57 / −1 | 1 / 126 |
| 683 | −14 / 126 | −14 / −1 | 1 / 126 |
| 684 | −14 / 45 | −14 / −1 | 1 / 45 |
| 685 | −36 / 65 | −36 / −1 | 1 / 65 |
| 686 | −55 / 286 | −55 / −1 | 1 / 286 |
| 687 | −42 / 66 | −42 / −1 | 1 / 66 |
| 688 | −26 / 54 | −26 / −1 | 1 / 54 |
| 689 | −44 / 114 | −44 / −1 | 1 / 114 |
| 690 | −28 / 102 | −28 / −1 | 1 / 102 |
| 691 | −62 / 137 | −62 / −1 | 1 / 137 |
| 692 | −25 / 155 | −25 / −1 | 1 / 155 |
| 741 | −22 / 156 | −22 / −1 | 1 / 156 |
| 742 | −19 / 71 | −19 / −1 | 1 / 71 |
| 743 | −15 / 110 | −15 / −1 | 1 / 110 |
| 744 | −34 / 102 | −34 / −1 | 1 / 102 |
| 745 | −53 / 185 | −53 / −1 | 1 / 185 |
| 746 | −71 / 35 | −71 / −1 | 1 / 35 |
| 747 | −84 / 39 | −84 / −1 | 1 / 39 |
| 748 | −49 / 26 | −49 / −1 | 1 / 26 |
| 749 | −40 / 40 | −40 / −1 | 1 / 40 |
| 750 | −49 / 278 | −49 / −1 | 1 / 278 |
| 751 | −20 / 215 | −20 / −1 | 1 / 215 |
| 752 | −31 / 21 | −31 / −1 | 1 / 21 |
| 753 | −47 / 182 | −47 / −1 | 1 / 182 |
| 754 | −24 / 68 | −24 / −1 | 1 / 68 |
| 755 | −23 / 402 | −23 / −1 | 1 / 402 |
| 756 | −62 / 25 | −62 / −1 | 1 / 25 |
| 757 | −100 / 49 | −100 / −1 | 1 / 49 |
| 758 | −35 / 152 | −35 / −1 | 1 / 152 |
| 759 | −26 / 97 | −26 / −1 | 1 / 97 |
| 760 | −102 / 51 | −102 / −1 | 1 / 51 |
| 761 | 1 / 72 | — | 1 / 72 |
| 762 | −20 / 155 | −20 / −1 | 1 / 155 |
| 763 | −20 / 283 | −20 / −1 | 1 / 283 |
| 764 | −39 / 26 | −39 / −1 | 1 / 26 |
| 765 | −17 / 120 | −17 / −1 | 1 / 120 |
| 766 | −13 / 141 | −13 / −1 | 1 / 141 |
| 767 | −36 / 67 | −36 / −1 | 1 / 67 |
| 768 | −74 / 12 | −74 / −1 | 1 / 12 |
| 769 | −310 / 85 | −310 / −1 | 1 / 85 |
| 770 | −18 / 75 | −18 / −1 | 1 / 75 |
| 771 | −21 / 40 | −21 / −1 | 1 / 40 |
| 772 | −31 / 300 | −31 / −1 | 1 / 300 |
| 773 | −99 / 111 | −99 / −1 | 1 / 111 |
| 774 | −67 / 12 | −67 / −1 | 1 / 12 |
| 775 | 1 / 84 | — | 1 / 84 |
| 776 | −20 / 72 | −20 / −1 | 1 / 72 |
| 777 | −14 / 196 | −14 / −1 | 1 / 196 |
| 778 | −139 / 66 | −139 / −1 | 1 / 66 |
| 779 | −17 / 68 | −17 / −1 | 1 / 68 |
| 780 | −51 / 64 | −51 / −1 | 1 / 64 |
| 781 | −31 / 50 | −31 / −1 | 1 / 50 |
| 782 | −39 / 196 | −39 / −1 | 1 / 196 |
| 783 | −21 / 41 | −21 / −1 | 1 / 41 |
| 784 | 1 / 11 | — | 1 / 11 |
| 785 | −34 / 22 | −34 / −1 | 1 / 22 |
| 786 | −32 / 67 | −32 / −1 | 1 / 67 |
| 787 | −27 / 133 | −27 / −1 | 1 / 133 |
| 788 | −22 / 37 | −22 / −1 | 1 / 37 |
| 789 | −48 / 64 | −48 / −1 | 1 / 64 |
| 790 | −56 / 55 | −56 / −1 | 1 / 55 |
| 791 | −77 / 67 | −77 / −1 | 1 / 67 |
| 792 | −18 / 92 | −18 / −1 | 1 / 92 |
| 793 | −36 / 43 | −36 / −1 | 1 / 43 |
| 794 | −34 / 162 | −34 / −1 | 1 / 162 |
| 795 | −18 / 159 | −18 / −1 | 1 / 159 |
| 796 | −22 / 83 | −22 / −1 | 1 / 83 |
| 797 | −48 / 100 | −48 / −1 | 1 / 100 |
| 798 | −23 / 236 | −23 / −1 | 1 / 236 |
| 799 | −62 / 49 | −62 / −1 | 1 / 49 |
| 800 | −23 / 288 | −23 / −1 | 1 / 288 |
| 801 | −60 / 31 | −60 / −1 | 1 / 31 |
| 802 | −17 / 270 | −17 / −1 | 1 / 270 |
| 803 | −49 / 55 | −49 / −1 | 1 / 55 |
| 804 | −36 / 48 | −36 / −1 | 1 / 48 |
| 805 | −20 / 111 | −20 / −1 | 1 / 111 |
| 806 | −23 / 108 | −23 / −1 | 1 / 108 |
| 807 | −16 / 319 | −16 / −1 | 1 / 319 |
| 808 | −55 / 29 | −55 / −1 | 1 / 29 |
| 809 | −18 / 262 | −18 / −1 | 1 / 262 |
| 810 | −51 / 89 | −51 / −1 | 1 / 89 |

[0998] TABLE III

| Id | Positions of preferred fragments |
|---|---|
| 1 | 1-126, 164-259, 420-432, 1404-1450 |
| 2 | 32-44, 4199-1556 |
| 3 | 1-19, 1011-1058 |
| 4 | 1-16, 108-159, 595-648 |
| 5 | 1-119, 486-665, 1968-2009, 2055-2104 |
| 6 | 424-435, 500-515 |
| 7 | 1-122, 242-661 |
| 8 | 1-16, 649-694 |
| 9 | 1-663, 1070-110 |
| 10 | 1-129, 541-623 |
| 11 | 1-200, 614-657 |
| 12 | 1-419, 1094-1137 |
| 13 | 1-127, 323-331, 595-636 |
| 14 | 804-818 |
| 15 | 1-47, 438-611, 1005-1133, 1846-1888 |
| 16 | 1-430, 527-1894 |
| 17 | 1-119, 1743-1792, 1866-1913 |
| 18 | 1-70, 133-1235, 1729-1744 |
| 19 | 575-615, 896-946 |
| 20 | 513-526, 950-960, 1577-1622 |
| 21 | 1-2, 210-265, 674-715 |
| 22 | 1400-1441, 1508-1549 |
| 23 | 1-4, 1284, 1328 |

[0999] TABLE IVa

| Seq Id N° | Preferred fragments |
|---|---|
| 1 | 1-58: 343-1359: 1434-1450 |
| 2 | 455-1556 |
| 3 | 553-634: 1042-1058 |
| 4 | 608-648 |
| 5 | 452-481: 620-2104 |
| 6 | 424-515 |
| 7 | 497-661 |
| 8 | 529-694 |
| 9 | 639-1110 |
| 10 | 505-623 |
| 11 | 536-657 |
| 12 | 444-1137 |
| 13 | 593-636 |
| 14 | 448-818 |
| 15 | 643-1346: 1809-1888 |
| 16 | 276-1894 |
| 17 | 332-1913 |
| 18 | 392-1744 |
| 19 | 578-946 |
| 20 | 1-240: 645-1224: 1341-1622 |
| 21 | 695-715 |
| 22 | 472-706: 924-1549 |
| 23 | 495-1328 |
| 24 | 440-1193: 1494-1515 |
| 25 | 532-1024: 1065-1622 |
| 26 | 495-582: 1412-1448 |
| 27 | 427-894 |
| 28 | 500-1321: 1424-1447 |
| 29 | 487-1540 |
| 30 | 441-1272: 1330-1643 |
| 31 | 915-1314 |
| 32 | 453-2356 |
| 33 | 519-1701 |
| 34 | 550-772 |
| 35 | 340-987 |
| 36 | 467-1324 |
| 37 | 442-1918 |
| 38 | 521-852 |
| 39 | 452-726 |
| 40 | 128-143: 481-1039 |
| 41 | 492-1355 |
| 42 | 527-572 |
| 43 | 521-535 |
| 44 | 526-572 |
| 45 | 512-804 |
| 46 | 552-629 |
| 47 | 655-669 |
| 48 | 423-973 |
| 49 | 529-791 |
| 50 | 642-1110 |

[1000] TABLE IVb

| Seq Id N° | Excluded fragments |
|---|---|
| 1 | 59-342: 1360-1433 |
| 2 | 1-454 |
| 3 | 1-552: 635-1041 |
| 4 | 1-607 |
| 5 | 1-451: 482-619 |
| 6 | 1-423 |
| 7 | 1-496 |
| 8 | 1-528 |
| 9 | 1-638 |
| 10 | 1-504 |
| 11 | 1-535 |
| 12 | 1-443 |
| 13 | 1-592 |
| 14 | 1-447 |
| 15 | 1-642: 1347-1808 |
| 16 | 1-275 |
| 17 | 1-331 |
| 18 | 1-391 |
| 19 | 1-577 |
| 20 | 241-644: 1225-1340 |
| 21 | 1-694 |
| 22 | 1-471: 707-923 |
| 23 | 1-494 |
| 24 | 1-439: 1194-1493 |
| 25 | 1-531: 1025-1064 |
| 26 | 1-494: 583-1411 |
| 27 | 1-426 |
| 28 | 1-499: 1322-1423 |
| 29 | 1-486 |
| 30 | 1-440: 1273-1329 |
| 31 | 1-914 |
| 32 | 1-452 |
| 33 | 1-518 |
| 34 | 1-549 |
| 35 | 1-339 |
| 36 | 1-466 |
| 37 | 1-441 |
| 38 | 1-520 |
| 39 | 1-451 |
| 40 | 1-127: 144-480 |
| 41 | 1-491 |
| 42 | 1-526 |
| 43 | 1-520 |
| 44 | 1-525 |
| 45 | 1-511 |
| 46 | 1-551 |
| 47 | 1-654 |
| 48 | 1-422 |
| 49 | 1-528 |
| 50 | 1-641 |

[1001] TABLE V

| | Nucleotide | Protein |
|---|---|---|
| Internal designation | SEQ ID NO | SEQ ID NO |
| 105-016-3-0-E3-FL | 1 | 406 |
| 105-031-3-0-D6-FL | 2 | 407 |
| 105-095-1-0-D10-FL | 3 | 408 |
| 105-118-4-0-E6-FL | 4 | 409 |
| 114-025-2-0-F11-FL | 5 | 410 |
| 116-005-4-0-G11-FL | 6 | 411 |
| 116-032-2-0-F9-FL | 7 | 412 |
| 116-047-3-0-B1-FL | 8 | 413 |
| 116-048-4-0-A6-FL | 9 | 414 |
| 116-049-1-0-F2-FL | 10 | 415 |
| 116-050-2-0-A11-FL | 11 | 416 |
| 116-054-3-0-E6-FL | 12 | 417 |
| 116-054-3-0-G12-FL | 13 | 418 |
| 116-073-4-0-C8-FL | 14 | 419 |
| 117-002-3-0-G3-FL | 15 | 420 |
| 117-005-2-0-E10-FL | 16 | 421 |
| 117-005-3-0-F2-FL | 17 | 422 |
| 117-005-4-0-E5-FL | 18 | 423 |
| 117-007-2-0-B5-FL | 19 | 424 |
| 117-007-2-0-C4-FL | 20 | 425 |
| 121-004-3-0-F6-FL | 21 | 426 |
| 122-005-2-0-F11-FL | 22 | 427 |
| 122-007-3-0-D10-FL | 23 | 428 |
| 108-004-5-0-B12-FL | 24 | 429 |
| 108-004-5-0-C10-FL | 25 | 430 |
| 108-004-5-0-G10-FL | 26 | 431 |
| 108-005-5-0-D4-FL | 27 | 432 |
| 108-005-5-0-F9-FL | 28 | 433 |
| 108-006-5-0-C7-FL | 29 | 434 |
| 108-006-5-0-E1-FL | 30 | 435 |
| 108-008-5-0-C5-FL | 31 | 436 |
| 108-008-5-0-G5-FL | 32 | 437 |
| 108-011-5-0-B12-FL | 33 | 438 |
| 108-011-5-0-C7-FL | 34 | 439 |
| 108-011-5-0-G8-FL | 35 | 440 |
| 108-011-5-0-H2-FL | 36 | 441 |
| 108-013-5-0-G5-FL | 37 | 442 |
| 108-013-5-0-H9-FL | 38 | 443 |
| 108-014-5-0-A10-FL | 39 | 444 |
| 108-014-5-0-C7-FL | 40 | 445 |
| 108-014-5-0-D12-FL | 41 | 446 |
| 108-014-5-0-H8-FL | 42 | 447 |
| 108-015-5-0-E2-FL | 43 | 448 |
| 108-016-5-0-C12-FL | 44 | 449 |
| 108-016-5-0-D4-FL | 45 | 450 |
| 108-019-5-0-F10-FL | 46 | 451 |
| 108-019-5-0-F5-FL | 47 | 452 |
| 108-019-5-0-H3-FL | 48 | 453 |
| 108-020-5-0-D4-FL | 49 | 454 |
| 108-020-5-0-E3-FL | 50 | 455 |
| 20-5-2-C3-CL0_4 | 99 | 456 |
| 20-8-4-A11-CL2_6 | 100 | 457 |
| 21-1-4-F2-CL11_1 | 101 | 458 |
| 22-11-2-H9-CL1_1 | 102 | 459 |
| 25-7-3-D4-CL0_2 | 103 | 460 |
| 26-27-3-D7-CL0_1 | 104 | 461 |
| 26-35-4-H9-CL1_1 | 105 | 462 |
| 26-45-2-C4-CL2_6 | 106 | 463 |
| 27-1-2-B3-CL0_1 | 107 | 464 |
| 27-1-2-B3-CL0_2 | 108 | 465 |
| 27-19-3-G7-CL11_2 | 109 | 466 |
| 33-10-4-E2-CL13_4 | 110 | 467 |
| 33-10-4-H2-CL2_2 | 111 | 468 |
| 33-110-4-A5-CL1_1 | 112 | 469 |
| 33-13-1-C1-CL1_1 | 113 | 470 |
| 33-30-2-A6-CL0_1 | 114 | 471 |
| 33-35-4-F4-CL1_2 | 115 | 472 |
| 33-35-4-G1-CL1_2 | 116 | 473 |
| 33-36-3-E2-CL1_1 | 117 | 474 |
| 33-36-3-E2-CL1_2 | 118 | 475 |
| 33-36-3-F2-CL2_2 | 119 | 476 |
| 33-4-2-G5-CL2_1 | 120 | 477 |
| 33-49-1-H4-CL1_1 | 121 | 478 |
| 33-66-2-B10-CL4_1 | 422 | 479 |
| 33-97-4-G8-CL2_2 | 123 | 480 |
| 33-98-4-C1-CL1_3 | 124 | 481 |
| 47-14-1-C3-CL0_5 | 125 | 482 |
| 47-15-1-E11-CL0_1 | 126 | 483 |
| 47-15-1-H8-CL0_2 | 127 | 484 |
| 48-1-1-H7-CL0_1 | 128 | 485 |
| 48-1-1-H7-CL0_4 | 129 | 486 |
| 48-1-1-H7-CL0_5 | 130 | 487 |
| 48-3-1-H9-CL0_6 | 131 | 488 |
| 48-54-1-G9-CL2_1 | 132 | 489 |
| 48-54-1-G9-CL3_1 | 133 | 490 |
| 48-7-4-H2-CL2_2 | 134 | 491 |
| 51-11-3-D5-CL1_3 | 135 | 492 |
| 51-11-3-G9-CL0_1 | 136 | 493 |
| 51-15-4-A12-CL11_3 | 137 | 494 |
| 51-17-4-A4-CL3_1 | 138 | 495 |
| 51-2-3-F10-CL1_5 | 139 | 496 |
| 51-2-4-F5-CL11_2 | 140 | 497 |
| 51-27-4-F2-CL0_2 | 141 | 498 |
| 51-34-3-F8-CL0_2 | 142 | 499 |
| 57-1-4-E2-CL1_2 | 143 | 500 |
| 57-19-2-G8-CL2_1 | 144 | 501 |
| 57-27-3-G10-CL2_2 | 145 | 502 |
| 58-33-3-B4-CL1_2 | 146 | 503 |
| 58-34-3-C9-CL1_2 | 147 | 504 |
| 58-4-4-G2-CL2_1 | 148 | 505 |
| 58-48-1-G3-CL2_4 | 149 | 506 |
| 58-6-1-H4-CL1_1 | 150 | 507 |
| 60-12-1-E11-CL1_2 | 151 | 508 |
| 65-4-4-H3-CL1_1 | 152 | 509 |
| 74-5-1-E4-CL1_2 | 153 | 510 |
| 76-13-3-A9-CL1_2 | 154 | 511 |
| 76-16-1-D6-CL1_1 | 155 | 512 |
| 76-28-3-A12-CL1_5 | 156 | 513 |
| 76-42-2-F3-CL0_1 | 157 | 514 |
| 77-16-4-G3-CL1_3 | 158 | 515 |
| 77-39-4-H4-CL11_4 | 159 | 516 |
| 78-24-3-H4-CL2_1 | 160 | 517 |
| 78-27-3-D1-CL1_6 | 161 | 518 |
| 78-28-3-D2-CL0_2 | 162 | 519 |
| 78-7-1-G5-CL2_6 | 163 | 520 |
| 84-3-1-G10-CL11_6 | 164 | 521 |
| 58-48-4-E2-CL0_1 | 165 | 522 |
| 23-12-2-G6-CL1_2 | 166 | 523 |
| 25-8-4-B12-CL0_5 | 167 | 524 |
| 26-44-3-C5-CL2_1 | 168 | 525 |
| 27-1-2-B3-CL0_3 | 169 | 526 |
| 30-12-3-G5-CL0_1 | 170 | 527 |
| 33-106-2-F10-CL1_3 | 171 | 528 |
| 33-28-4-D1-CL0_1 | 172 | 529 |
| 33-31-3-C8-CL2_1 | 173 | 530 |
| 48-24-1-D2-CL3_2 | 174 | 531 |
| 48-46-4-A11-CL1_4 | 175 | 532 |
| 51-1-4-C1-CL0_2 | 176 | 533 |
| 51-39-3-H2-CL1_2 | 177 | 534 |
| 51-42-3-F9-CL1_1 | 178 | 535 |
| 51-5-3-G2-CL0_4 | 179 | 536 |
| 57-18-4-H5-CL2_1 | 180 | 537 |
| 76-23-3-G8-CL1_1 | 181 | 538 |
| 76-23-3-G8-CL1_3 | 182 | 539 |
| 78-8-3-E6-CL0_1 | 183 | 540 |
| 19-10-1-C2-CL1_3 | 184 | 541 |
| 33-11-1-B11-CL1_2 | 185 | 542 |
| 33-113-2-B8-CL1_2 | 186 | 543 |
| 33-19-1-C11-CL1_1 | 187 | 544 |
| 33-61-2-F6-CL0_2 | 188 | 545 |
| 47-4-4-C6-CL2_2 | 189 | 546 |
| 48-54-1-G9-CL1_1 | 190 | 547 |
| 51-43-3-G3-CL0_1 | 191 | 548 |
| 55-1-3-D11-CL0_1 | 192 | 549 |
| 58-14-2-D3-CL1_2 | 193 | 550 |
| 58-35-2-B6-CL2_3 | 194 | 551 |
| 76-18-1-F6-CL1_1 | 195 | 552 |
| 76-23-3-G8-CL2_2 | 196 | 553 |
| 76-30-3-B7-CL1_1 | 197 | 554 |
| 78-21-3-G7-CL2_1 | 198 | 555 |
| 58-45-4-B11-CL13_2 | 199 | 556 |
| 20-6-1-D11-FL2 | 200 | 557 |
| 20-8-4-A11-FL2 | 201 | 558 |
| 22-6-2-C1-FL2 | 202 | 559 |
| 22-11-2-H9-FL1 | 203 | 560 |
| 23-8-3-B1-FL1 | 204 | 561 |
| 24-3-3-C6-FL1 | 205 | 562 |
| 24-4-1-H3-FL1 | 206 | 563 |
| 26-45-2-C4-FL2 | 207 | 564 |
| 26-48-1-H10-FL1 | 208 | 565 |
| 26-49-1-A5-FL2 | 209 | 566 |
| 30-6-4-E3-FL3 | 210 | 567 |
| 33-6-1-G11-FL1 | 211 | 568 |
| 33-8-1-A3-FL2 | 212 | 569 |
| 33-11-3-C6-FL1 | 213 | 570 |
| 33-14-4-E1-FL1 | 214 | 571 |
| 33-21-2-D5-FL1 | 215 | 572 |
| 33-26-4-E10-FL1 | 216 | 573 |
| 33-27-1-E11-FL1 | 217 | 574 |
| 33-28-4-D1-FL1 | 218 | 575 |
| 33-28-4-E2-FL2 | 219 | 576 |
| 33-30-4-C4-FL1 | 220 | 577 |
| 33-35-4-F4-FL1 | 221 | 578 |
| 33-36-3-F2-FL2 | 222 | 579 |
| 33-52-4-F9-FL2 | 223 | 580 |
| 33-52-4-H3-FL1 | 224 | 581 |
| 33-59-1-B7-FL1 | 225 | 582 |
| 33-71-1-A8-FL1 | 226 | 583 |
| 33-72-2-B2-FL1 | 227 | 584 |
| 33-105-2-C3-FL1 | 228 | 585 |
| 33-107-4-C3-FL1 | 229 | 586 |
| 33-110-2-G4-FL1 | 230 | 587 |
| 47-7-4-D2-FL2 | 231 | 588 |
| 47-10-2-G12-FL1 | 232 | 589 |
| 47-14-3-D8-FL1 | 233 | 590 |
| 47-18-3-C2-FL1 | 234 | 591 |
| 47-18-3-G5-FL2 | 235 | 592 |
| 47-18-4-E3-FL2 | 236 | 593 |
| 48-3-1-H9-FL3 | 237 | 594 |
| 48-4-2-H3-FL1 | 238 | 595 |
| 48-6-1-C9-FL1 | 239 | 596 |
| 48-7-4-H2-FL2 | 240 | 597 |
| 48-8-1-D8-FL3 | 241 | 598 |
| 48-13-3-H8-FL1 | 242 | 599 |
| 48-19-3-A7-FL1 | 243 | 600 |
| 48-19-3-G1-FL1 | 244 | 601 |
| 48-25-4-D8-FL1 | 245 | 602 |
| 48-21-4-H4-FL1 | 246 | 603 |
| 48-26-3-B8-FL2 | 247 | 604 |
| 48-29-1-E2-FL1 | 248 | 605 |
| 48-31-3-F7-FL1 | 249 | 606 |
| 48-47-3-A5-FL1 | 250 | 607 |
| 51-1-1-G12-FL1 | 251 | 608 |
| 51-1-4-E9-FL3 | 252 | 609 |
| 51-1-4-E9-FL2 | 253 | 610 |
| 51-2-1-E10-FL1 | 254 | 611 |
| 51-2-3-F10-FL1 | 255 | 612 |
| 51-2-4-F5-FL1 | 256 | 613 |
| 51-3-3-B10-FL2 | 257 | 614 |
| 51-3-3-B10-FL3 | 258 | 615 |
| 51-7-3-G3-FL1 | 259 | 616 |
| 51-10-3-D11-FL1 | 260 | 617 |
| 51-11-3-D5-FL1 | 261 | 618 |
| 51-13-1-F7-FL3 | 262 | 619 |
| 51-15-4-H10-FL1 | 263 | 620 |
| 51-17-4-A4-FL1 | 264 | 621 |
| 51-18-1-C3-FL1 | 265 | 622 |
| 51-25-3-F3-FL1 | 266 | 623 |
| 51-27-1-E8-FL1 | 267 | 624 |
| 51-28-2-G1-FL2 | 268 | 625 |
| 51-39-3-H2-FL1 | 269 | 626 |
| 51-42-3-F9-FL1 | 270 | 627 |
| 51-44-4-H4-FL1 | 271 | 628 |
| 55-1-3-H10-FL1 | 272 | 629 |
| 55-5-4-A6-FL1 | 273 | 630 |
| 58-26-3-D1-FL1 | 274 | 631 |
| 57-18-1-D5-FL1 | 275 | 632 |
| 57-27-3-A11-FL1 | 276 | 633 |
| 57-27-3-G10-FL2 | 277 | 634 |
| 58-10-3-D12-FL1 | 278 | 635 |
| 58-26-3-D1-FL1 | 274 | 631 |
| 58-11-1-G10-FL1 | 279 | 636 |
| 58-11-2-G8-FL2 | 280 | 637 |
| 58-36-3-A9-FL2 | 281 | 638 |
| 58-38-1-A2-FL2 | 282 | 639 |
| 58-38-1-E5-FL1 | 283 | 640 |
| 58-44-2-B3-FL3 | 284 | 641 |
| 58-45-3-H11-FL1 | 285 | 642 |
| 58-53-2-B12-FL2 | 286 | 643 |
| 59-9-4-A10-FL1 | 287 | 644 |
| 60-16-3-A6-FL1 | 288 | 645 |
| 60-17-3-G8-FL2 | 289 | 646 |
| 62-5-4-B10-FL1 | 290 | 647 |
| 65-4-4-H3-FL1 | 291 | 648 |
| 74-3-1-B9-FL1 | 292 | 649 |
| 76-4-1-G5-FL1 | 293 | 650 |
| 76-7-3-A12-FL1 | 294 | 651 |
| 76-16-4-C9-FL3 | 295 | 652 |
| 76-30-3-B7-FL1 | 296 | 653 |
| 77-5-1-C2-FL1 | 297 | 654 |
| 77-5-4-E7-FL1 | 298 | 655 |
| 77-11-1-A3-FL1 | 299 | 656 |
| 77-16-3-D7-FL1 | 300 | 657 |
| 77-16-4-G3-FL1 | 301 | 658 |
| 77-25-1-A6-FL1 | 302 | 659 |
| 77-26-2-F2-FL3 | 303 | 660 |
| 78-6-2-E3-FL2 | 304 | 661 |
| 78-7-1-G5-FL2 | 305 | 662 |
| 78-16-2-C2-FL1 | 306 | 663 |
| 78-18-3-B4-FL3 | 307 | 664 |
| 78-20-1-G11-FL1 | 308 | 665 |
| 78-22-3-E10-FL1 | 309 | 666 |
| 78-24-2-B8-FL1 | 310 | 667 |
| 78-24-3-A8-FL1 | 311 | 668 |
| 78-24-3-H4-FL2 | 312 | 669 |
| 78-25-1-F11-FL1 | 313 | 670 |
| 78-26-1-B5-FL1 | 314 | 671 |
| 78-27-3-D1-FL1 | 315 | 672 |
| 78-29-1-B2-FL1 | 316 | 673 |
| 78-29-4-B6-FL1 | 317 | 674 |
| 14-1-3-E6-FL1 | 318 | 675 |
| 30-9-1-G8-FL2 | 319 | 676 |
| 33-10-4-H2-FL2 | 320 | 677 |
| 33-10-4-H2-FL1 | 321 | 678 |
| 74-10-3-C9-FL2 | 322 | 679 |
| 33-97-4-G8-FL3 | 323 | 680 |
| 33-97-4-G8-FL2 | 324 | 681 |
| 33-104-4-H4-FL1 | 325 | 682 |
| 47-2-3-B3-FL1 | 326 | 683 |
| 47-37-4-G11-FL1 | 327 | 684 |
| 57-25-1-F10-FL2 | 328 | 685 |
| 58-19-3-D3-FL1 | 329 | 686 |
| 58-34-3-C9-FL2 | 330 | 687 |
| 58-48-4-E2-FL2 | 331 | 688 |
| 76-21-1-C4-FL1 | 332 | 689 |
| 78-26-2-H7-FL1 | 333 | 690 |
| 77-20-2-E11-FL1 | 334 | 691 |
| 47-1-3-F7-FL2 | 335 | 692 |
| 108-002-5-0-B1-FL | 336 | 741 |
| 108-002-5-0-F3-FL | 337 | 742 |
| 108-002-5-0-F4-FL | 338 | 743 |
| 108-003-5-0-A8-FL | 339 | 744 |
| 108-003-5-0-D2-FL | 340 | 745 |
| 108-003-5-0-E5-FL | 341 | 746 |
| 108-003-5-0-H2-FL | 342 | 747 |
| 108-004-5-0-B7-FL | 343 | 748 |
| 108-004-5-0-C8-FL | 344 | 749 |
| 108-004-5-0-D10-FL | 345 | 750 |
| 108-004-5-0-E8-FL | 346 | 751 |
| 108-004-5-0-F5-FL | 347 | 752 |
| 108-004-5-0-G6-FL | 348 | 753 |
| 108-005-5-0-B11-FL | 349 | 754 |
| 108-005-5-0-C1-FL | 350 | 755 |
| 108-005-5-0-F11-FL | 351 | 756 |
| 108-005-5-0-F6-FL | 352 | 757 |
| 108-006-5-0-C2-FL | 353 | 758 |
| 108-006-5-0-E6-FL | 354 | 759 |
| 108-006-5-0-G2-FL | 355 | 760 |
| 108-006-5-0-G4-FL | 356 | 761 |
| 108-008-5-0-A6-FL | 357 | 762 |
| 108-008-5-0-A8-FL | 358 | 763 |
| 108-008-5-0-C10-FL | 359 | 764 |
| 108-008-5-0-E6-FL | 360 | 765 |
| 108-008-5-0-F6-FL | 361 | 766 |
| 108-008-5-0-G12-FL | 362 | 767 |
| 108-008-5-0-G4-FL | 363 | 768 |
| 108-009-5-0-A2-FL | 364 | 769 |
| 108-013-5-0-C12-FL | 365 | 770 |
| 108-013-5-0-G11-FL | 366 | 771 |
| 108-003-5-0-E4-FL | 367 | 772 |
| 108-005-5-0-D6-FL | 368 | 773 |
| 108-008-5-0-G3-FL | 369 | 774 |
| 108-013-5-0-B5-FL | 370 | 775 |
| 26-44-1-B5-CL3_1 | 371 | 776 |
| 47-4-4-C6-CL2_3 | 372 | 777 |
| 47-40-4-G9-CL1_1 | 373 | 778 |
| 48-25-4-D8-CL1_7 | 374 | 779 |
| 48-28-3-A9-CL0_1 | 375 | 780 |
| 51-25-1-A2-CL3_1 | 376 | 781 |
| 55-10-3-F5-CL0_3 | 377 | 782 |
| 57-19-2-G8-CL1_3 | 378 | 783 |
| 58-34-2-H8-CL1_3 | 379 | 784 |
| 76-13-3-A9-CL1_1 | 380 | 785 |
| 78-7-2-B8-FL1 | 381 | 786 |
| 77-8-4-F9-FL1 | 382 | 787 |
| 58-8-1-F2-FL2 | 383 | 788 |
| 77-13-1-A7-FL2 | 384 | 789 |
| 47-2-3-G9-FL1 | 385 | 790 |
| 33-75-4-H7-FL1 | 386 | 791 |
| 51-41-1-F10-FL1 | 387 | 792 |
| 48-51-4-C11-FL1 | 388 | 793 |
| 33-58-3-C8-FL1 | 389 | 794 |
| 76-20-4-C11-FL1 | 390 | 795 |
| 76-28-3-A12-FL1 | 391 | 796 |
| 76-25-4-F11-FL1 | 392 | 797 |
| 58-20-4-G7-FL1 | 393 | 798 |
| 33-54-1-B9-FL1 | 394 | 799 |
| 76-20-3-H1-FL1 | 395 | 800 |
| 47-20-2-G3-FL1 | 396 | 801 |
| 78-25-1-H11-FL1 | 397 | 802 |
| 78-6-2-B10-FL1 | 398 | 803 |
| 58-49-3-G10-FL1 | 399 | 804 |
| 78-21-1-B7-FL1 | 400 | 805 |
| 57-28-4-B12-FL1 | 401 | 806 |
| 33-77-4-E2-FL1 | 402 | 807 |
| 58-19-3-D3-FL2 | 403 | 808 |
| 37-7-4-E7-FL1 | 404 | 809 |
| 60-14-2-H10-FL1 | 405 | 810 |

[1002] TABLE VI

| Seq Id No | Tissue expression |
|---|---|
| 1 | prostate: 2 |
| 2 | fetal kidney: 1 prostate: 3 |
| 4 | prostate: 1 |
| 5 | liver: 1 |
| 6 | testis: 1 |
| 7 | testis: 3 |
| 8 | testis: 1 |
| 9 | testis: 1 |
| 10 | testis: 1 |
| 11 | liver: 1 testis: 3 |
| 12 | liver: 1 testis: 3 |
| 13 | testis: 1 |
| 14 | testis: 1 |
| 15 | liver: 2 |
| 16 | liver: 3 |
| 17 | liver: 1 |
| 18 | liver: 1 |
| 19 | brain: 2 liver: 1 placenta: 6 |
| | salivary gland: 1 |
| 20 | fetal brain: 6 |
| 21 | fetal brain: 6 placenta: 2 |
| 22 | fetal brain: 9 |
| 23 | prostate: 2 |
| 24 | prostate: 3 |
| 25 | prostate: 1 |
| 26 | prostate: 1 |
| 27 | prostate: 3 |
| 28 | prostate: 3 |
| 29 | prostate: 2 |
| 30 | prostate: 1 |
| 31 | prostate: 1 |
| 32 | liver: 15 testis: 3 |
| 33 | liver: 1 testis: 8 |
| 34 | brain: 1 |
| 35 | prostate: 1 |
| 36 | liver: 15 |
| 37 | prostate: 2 |
| 38 | testis: 1 |
| 39 | testis: 3 |
| 40 | liver: 2 |
| 41 | liver: 1 testis: 2 |
| 42 | liver: 5 testis: 20 |
| 43 | brain: 4 fetal brain: 10 |
| | fetal kidney: 1 fetal livery: 1 |
| | placenta: 1 prostate: 1 |
| 44 | brain: 3 fetal brain: 4 |
| | fetal kidney: 7 prostate: 1 |
| | salivary gland: 1 testis: 2 |
| 45 | liver: 1 testis: 1 |
| 46 | fetal livery: 1 prostate: 1 |
| | salivary gland: 3 |
| | stomach/intestine: 2 testis: 1 |
| 47 | testis: 1 |
| 48 | fetal brain: 4 |
| 49 | brain: 85 |

[1003] TABLE VII

| Seq Id No | Preferential expression |
|---|---|
| 1 | Prostate |
| 2 | Prostate |
| 4 | Prostate |
| 5 | None |
| 6 | None |
| 7 | Testis |
| 8 | None |
| 9 | None |
| 10 | None |
| 11 | Testis |
| 12 | Testis |
| 13 | None |
| 14 | None |
| 15 | Liver |
| 16 | Liver |
| 17 | None |
| 18 | None |
| 19 | Placenta |
| 20 | Fetal brain |
| 21 | None |
| 22 | Fetal brain |
| 23 | Prostate |
| 24 | Prostate |
| 25 | Prostate |
| 26 | Prostate |
| 27 | Prostate |
| 28 | Prostate |
| 29 | Prostate |
| 30 | Prostate |
| 31 | Prostate |
| 32 | Liver |
| 33 | Testis |
| 34 | None |
| 35 | Prostate |
| 36 | Liver |
| 37 | Prostate |
| 38 | None |
| 39 | Testis |
| 40 | Liver |
| 41 | None |
| 42 | Testis |
| 43 | None |
| 44 | Fetal kidney |
| 45 | None |
| 46 | Salivary gland, Stomach/Intestine |
| 47 | None |
| 48 | Fetal brain |
| 49 | Brain |

[1004] TABLE VIII

| Seq Id No | Public expression |
|---|---|
| 1 | frontal lobe(2) |
| 2 | B-cell, chronic lymphotic leukemia(2), |
| | “adenocarcinoma”(2), “germinal |
| | center B cell”(2), “liver”(1), |
| | “lung”(1), “tumor”(1) |
| 4 | 2 pooled tumors (clear cell type)(5), |
| | “adenocarcinoma”(1), “anaplastic |
| | oligodendroglioma”(4), “brain”(3), |
| | “breast”(4), “breast tumor”(1), |
| | “carcinoid”(5), “cerebellum”(1), |
| | “colon”(4), “colon tumor RER+”(2), |
| | “frontal lobe”(5), “germinal center B |
| | cell”(4), “glioblastoma (pooled)”(2), |
| | “moderately-differentiated adenocarcinoma”(1), |
| | “normal prostate”(3), “ovary”(2), “parathyroid |
| | tumor”(4), “pectoral muscle (after mastectomy)”(1), |
| | “pooled germ cell tumors”(5), “senescent |
| | fibroblast”(4), “tumor”(1), “tumor, 5 |
| | pooled (see description)”(1) |
| 5 | colon(1), “neuroepithelial cells”(1) |
| 6 | 2 pooled tumors (clear cell type)(2), |
| | “anaplastic oligodendroglioma”(2), |
| | “borderline ovarian carcinoma”(1), |
| | “carcinoid”(3), “colon”(1), “epithelium |
| | (cell line)”(1), “glioblastoma (pooled)”(1), |
| | “ovarian tumor”(1), “pooled germ |
| | cell tumors”(2) |
| 7 | NONE |
| 8 | 2 pooled tumors (clear cell type)(5), |
| | “breast”(1), “carcinoid”(1), “colon tumor, |
| | RER+”(1), “kidney tumor”(1), “pooled |
| | germ cell tumors”(1) |
| 9 | NONE |
| 10 | 2 pooled tumors (clear cell type)(2) |
| 11 | NONE |
| 12 | NONE |
| 13 | 2 pooled tumors (clear cell type)(4), “breast”(1), |
| | “prostate”(1) |
| 14 | pooled germ cell tumors(1) |
| 15 | NONE |
| 16 | liver(2) |
| 17 | B-cell, chronic lymphotic leukemia(2), “brain”(1), |
| | “carcinoid”(1), “colon”(1) |
| 18 | NONE |
| 19 | anaplastic oligodendroglioma(2), “cerebellum”(1), |
| | “colon”(1), “glioblastoma (pooled)”(5), |
| | “metastatic prostate bone lesion”(1), “normal |
| | epithelium”(1), “parathyroid tumor”(1), |
| | “pooled germ cell tumors”(1), “renal cell |
| | tumor”(1), “retina”(2), “squamous cell |
| | carcinoma”(1), “squamous cell carcinoma from |
| | base of tongue”(1), “three pooled meningiomas”(1) |
| 20 | anaplastic oligodendroglioma(1), “brain”(1), |
| | “frontal lobe”(6), “total brain”(2) |
| 21 | Lung(1), “muscle”(1), “parathyroid |
| | tumor”(1), “synovial membrane”(1) |
| 22 | neuroepithelial cells(1), “total brain”(1) |
| 23 | Bone(1), “bone marrow stroma”(1), “brain”(1), |
| | “testis”(1) |
| 24 | NONE |
| 25 | parathyroid tumor(1), “retina”(1), |
| | “total brain”(2) |
| 26 | NONE |
| 27 | ovarian tumor(3), “retina”(1), “senescent |
| | fibroblast”(1) |
| 28 | normal prostate(1) |
| 29 | NONE |
| 30 | foreskin(1) |
| 31 | NONE |
| 32 | NONE |
| 33 | NONE |
| 34 | NONE |
| 35 | adenocarcinoma(1), “pectoral muscle (after |
| | mastectomy)”(1) |
| 36 | juvenile granulosa rumor(1), “liver”(1), |
| | “senescent fibroblast”(1) |
| 37 | 2 pooled tumors (clear cell type)(2), “germinal |
| | center B cell”(6) |
| 38 | NONE |
| 39 | NONE |
| 40 | NONE |
| 41 | NONE |
| 42 | NONE |
| 43 | B-cell, chronic lymphotic leukemia(1), |
| | “adenocarcinoma”(1), “anaplastic |
| | oligodendroglioma”(3), “carcinoid”(3), |
| | “frontal lobe”(2), “glioblastoma |
| | (pooled)”(4), “normal epithelium”(1), |
| | “pooled germ cell tumors”(1) |
| 44 | 2 pooled tumors (clear cell type)(5), |
| | “Lung”(1), “adenocarcinoma”(4), |
| | “adipose tissue, white”(1), “adrenal |
| | adenoma”(1), “anaplastic |
| | oligodendroglioma”(2), “breast tumor”(1), |
| | “carcinoid”(1), “colon”(4), |
| | “epithelium (cell line)”(1), “liver”(1), |
| | “melanocyte”(1), “ovarian tumor”(1), |
| | “parathyroid tumor”(6), “pectoral muscle |
| | (after mastectomy)”(4), “squamous |
| | cell carcinoma”(1), “synovial membrane”(3) |
| 45 | NONE |
| 46 | 2 pooled tumors (clear cell type)(1), “anaplastic |
| | oligodendroglioma”(2), “carcinoid”(3), |
| | “colon”(4), “epithelium (cell line)”(1), |
| | “glioblastoma (pooled)”(1), “normal |
| | prostate”(2), “ovarian tumor”(2), “pooled |
| | germ cell tumors”(3), “senescent |
| | fibroblast”(2), “testis”(1) |
| 47 | NONE |
| 48 | anaplastic oligodendroglioma(2), |
| | “astrocytoma”(1), “glioblastoma |
| | (pooled)”(1), “total brain”(1) |
| 49 | NONE |

[1005] TABLE IX

| Seq | | | |
|---|---|---|---|
| Id | | | |
| No | Positions | Motif designation | Database |
| 406 | none | none | none |
| 407 | none | none | none |
| 408 | none | none | none |
| 409 | 33-79 | PHD | Pfam |
| 410 | none | none | none |
| 411 | none | none | none |
| 412 | none | none | none |
| 413 | 28-94 | pfkB | Pfam |
| 414 | none | none | none |
| 415 | none | none | none |
| 416 | none | none | none |
| 417 | none | none | none |
| 418 | none | none | none |
| 419 | 88-213 | lys | Pfam |
| 419 | 183-202 | BL00128C Alpha-lactalbumin / | BLOCKSPLUS |
| | | lysozyme C signature | |
| 419 | 111-120 | PR00135B lysozyme/alpha- | BLOCKSPLUS |
| | | lactalbumin superfamily | |
| | | signature | |
| 419 | 162-180 | Alpha-lactalbumin / | PROSITE |
| | | lysozyme C signature | |
| 420 | 246-266 | PSAP | Pfam |
| 421 | 92-207 | NusB | Pfam |
| 421 | 4-251 | Apolipoprotein | Pfam |
| 421 | 110-263 | Nop | Pfam |
| 422 | none | none | none |
| 423 | 2-134 | mito_carr 1/2 | Pfam |
| 423 | 156-303 | mito_carr 2/2 | Pfam |
| 423 | 5-29 | BL00215A Mitochondrial | BLOCKSPLUS |
| | | energy transfer proteins | |
| 423 | 223-247 | BL00215A Mitochondrial | BLOCKSPLUS |
| | | energy transfer proteins | |
| 423 | 102-125 | BL00215A Mitochondrial | BLOCKSPLUS |
| | | energy transfer proteins | |
| 423 | 169-182 | BL00215B Mitochondrial | BLOCKSPLUS |
| | | energy transfer proteins | |
| 424 | none | none | none |
| 425 | 37-104 | cystatin 1/2 | Pfam |
| 425 | 157-254 | cystatin 2/2 | Pfam |
| 426 | 105-154 | GST | Pfam |
| 427 | 27-131 | Cyt_reductase | Pfam |
| 427 | 158-272 | oxidored_fad | Pfam |
| 427 | 256-265 | PR00406F cytochrome b5 | BLOCKSPLUS |
| | | reductase signature | |
| 427 | 123-138 | PR00406C cytochrome b5 | BLOCKSPLUS |
| | | reductase signature | |
| 427 | 256-268 | BL00559L Eukaryotic | BLOCKSPLUS |
| | | molybdopterin oxidoreductases | |
| | | proteins | |
| 427 | 163-180 | PR00406D cytochrome b5 | BLOCKSPLUS |
| | | reductase signature | |
| 427 | 163-179 | PR00371D flavoprotein | BLOCKSPLUS |
| | | pyridine nucleotide | |
| | | cytochrome reductase | |
| | | signature | |
| 427 | 110-120 | PR00371C flavoprotein | BLOCKSPLUS |
| | | pyridine nucleotide | |
| | | cytochrome reductase | |
| | | signature | |
| 428 | 7-27 | PR00953B flagellar | BLOCKSPLUS |
| | | biosynthetic protein | |
| | | flir signature | |
| 429 | none | none | none |
| 430 | none | none | none |
| 431 | none | none | none |
| 432 | none | none | none |
| 433 | 7-214 | Hydrolase | Pfam |
| 434 | 48-53 | Cytochrome c family | PROSITE |
| | | heme-binding site | |
| 434 | 24-26 | Protein kinase C | PROSITE |
| | | phosphorylation site | |
| 435 | none | none | none |
| 436 | none | none | none |
| 437 | 302-339 | zf-C3HC4 | Pfam |
| 438 | none | none | none |
| 439 | 17-67 | rnaseA | Pfam |
| 440 | none | none | none |
| 441 | none | none | none |
| 442 | 17-40 | A2M_N | Pfam |
| 443 | 52-66 | PR00111B alpha/beta | BLOCKSPLUS |
| | | hydrolase fold signature | |
| 444 | none | none | none |
| 445 | 59-61 | Cell attachment sequence | PROSITE |
| 446 | 258-298 | zf-C3HC4 | Pfam |
| 446 | 257-301 | PHD | Pfam |
| 447 | none | none | none |
| 448 | none | none | none |
| 449 | none | none | none |
| 450 | none | none | none |
| 451 | none | none | none |
| 452 | none | none | none |
| 453 | none | none | none |
| 454 | none | none | none |
| 455 | none | none | none |
| 510 | 110-121 | Aldehyde dehydrogenase | PROSITE |
| | | cysteine active site | |
| 536 | 28-37 | ATP synthase alpha and | PROSITE |
| | | beta subunits signature | |
| 538 | 171-181 | Regulator of chromosome | PROSITE |
| | | condensation (RCC1) | |
| | | signature 2 | |
| 540 | 90-112 | Phosphatidylethanolamine- | PROSITE |
| | | binding protein family | |
| | | signature | |
| 541 | 10-34 | Protein kinases | PROSITE |
| | | ATP-binding region | |
| | | signature | |

[1006] TABLE X

| Seq | |
|---|---|
| Id No | Antigenic epitopes |
| 406 | 58, 86-88, 148-149, 175-177, 238-239, 319 |
| 407 | 43-45, 58, 63-64, 72-74, 202, 204-205, 207, 237-238, |
| | 298 |
| 408 | 119, 121 |
| 409 | 21, 40-43 |
| 410 | 41, 43-44, 83, 103-104, 184-185, 187-188, 210-212, |
| | 366-367, 372-373, 396-397, 421, 475-477 |
| 411 | 84, 86-87 |
| 412 | 17, 37-38, 40-41, 43-44 |
| 413 | 97-98 |
| 414 | 34 |
| 415 | 20, 26-30, 83-86, 103, 111-112, 131 |
| 416 | 9-10, 96-97 |
| 417 | 220-222, 230-231 |
| 418 | 36, 44-47, 50-51, 67-68, 81-83 |
| 419 | 44-45, 105-106, 108-109, 147-149, 173, 202-203 |
| 420 | 129-130, 178, 311-312, 333-335, 368-369 |
| 421 | 34, 36-37, 319-320, 331-333 |
| 422 | 60 |
| 423 | 31-32, 157-158, 180, 215-216, 250 |
| 424 | 60-61 |
| 425 | 35, 37-38, 54-55, 57-58, 75-76, 160-161, 183-184, 215- |
| | 216, 230, 291-292, 296, 302, 309 |
| 426 | 5, 9, 11, 99, 184 |
| 427 | 61-62, 87-88, 109-110, 147-148, 216-217, 229-231, 252, 273 |
| 428 | 83, 89, 249-250 |
| 429 | 34-35, 209-211 |
| 430 | 104-106, 199-200, 228-229, 245-246, 292, 326-327, |
| | 342-343 |
| 431 | 25-28, 105-106, 108-109 |
| 432 | 59-60, 97-98, 101-102, 106-107, 159-160, 193-194, |
| | 207-208 |
| 433 | 61 |
| 434 | 56-57, 61-63, 83-84 |
| 435 | 47-48, 77-80, 100, 107 |
| 436 | 92-93 |
| 437 | 3-5, 59, 112-113, 213-214 |
| 438 | 31-32, 66, 108-109, 148-149, 165-167, 170-172, 290- |
| | 291, 339-340 |
| 439 | 32-34, 37-38, 57 |
| 440 | 6-7, 9, 11-12, 56-57 |
| 441 | 47-49, 91-92 |
| 442 | 38-39, 74, 92-93, 108-109, 116 |
| 443 | 17, 96 |
| 444 | 41-43 |
| 445 | 34-34, 84-85 |
| 446 | 83-84, 135-136, 264-265 |
| 447 | 19-23, 41 |
| 448 | 44-44, 109-109 |
| 449 | 4-5, 7-8, 55-56, 94-95 |
| 450 | 31-32, 38-40, 59-60 |
| 451 | 54-55, 59 |
| 452 | 137-137, 139-140 |
| 453 | 56, 86 |
| 454 | 4-5, 58-58, 67-68, 70-72, 74-77, 82-83 |
| 455 | 34 |

[1007] TABLE XI

| Seq Id No | Chromosomal location |
|---|---|
| 1 | none |
| 2 | 9 |
| 3 | 20 |
| 4 | 17 |
| 5 | 8 |
| 6 | 16 |
| 7 | 1 |
| 8 | none |
| 9 | none |
| 10 | none |
| 11 | none |
| 12 | none |
| 13 | none |
| 14 | 17 |
| 15 | 12q |
| 16 | 11 |
| 17 | 18 |
| 18 | 14 |
| 19 | 6p23-25.1 |
| 20 | none |
| 21 | 20q12 |
| 22 | none |
| 23 | 3 |
| 24 | none |
| 25 | 1 |
| 26 | 20 |
| 27 | none |
| 28 | 9 |
| 29 | 11q24 |
| 30 | 17 |
| 31 | none |
| 32 | 1 |
| 33 | 3 |
| 34 | 14 |
| 35 | 16 |
| 36 | 11 |
| 37 | 10 |
| 38 | none |
| 39 | none |
| 40 | 19 |
| 41 | none |
| 42 | 6 |
| 43 | X |
| 44 | 6p12.3-21.2 |
| 45 | 5 |
| 46 | none |
| 47 | 16 |
| 48 | 9 |
| 49 | 20 |
| 50 | none |

The application's sequence listing, which the Patent Office published only in electronic form, follows.

SEQUENCE LISTING (810 sequences)

SEQ ID NO: 1 - DNA, 1450 bp, Homo Sapiens
  CDS 153..1127
  sig_peptide 153..230: Von Heijne matrix score 8.40 seq RLLRLLLSGLVLG/AA
  polyA_signal 1415..1420
  polyA_site 1434..1450
  misc_feature 88: n=a, g, c or t
ctttcctcttcctcctcctcctccttggcatccgcctcttcttcctcctgcgtcctcccccgctgcctccgctgctcccgacgcggancccggagcccgcgccgagcccctggcctcgcggtgccatgctgccccggcggcggcgctgaaggatggcgacgccgctgcctccgccctccccgcggcacctgcggctgctgcggctgctgctctccggcctcgtcctcggcgccgccctgcgtggagccgccgccggccacccggatgtagccgcctgtcccgggagcctggactgtgccctgaagaggcgggcaaggtgtcctcctggtgcacatgcctgtgggccctgccttcagcccttccaggaggaccagcaagggctctgtgtgcccaggatgcgccggcctccaggcgggggccggccccagcccagactggaagatgagattgacttcctggcccaggagcttgcccggaaggagtctggacactcaactccgcccctacccaaggaccgacagcggctcccggagcctgccaccctgggcttctcggcacgggggcaggggctggagctgggcctcccctccactccaggaacccccacgcccacgccccacacctccctgggctcccctgtgtcatccgacccggtgcacatgtcgcccctggagccccggggagggcaaggcgacggcctcgcccttgtgctgatcctggcgttctgtgtggccggtgcagccgccctctccgtagcctccctctgctggtgcaggctgcagcgtgagatccgcctgactcagaaggccgactacgccactgcgaaggcccctggctcacctgcagctccccggatctcgcctggggaccagcggctggcacagagcgcggagatgtaccactaccagcaccaacggcaacagatgctgtgcctggagcggcataaagagccacccaaggagctggacacggcctcctcggatgaggagaatgaggacggagacttcacggtgtacgagtgcccgggcctggccccgaccggggaaatggaggtgcgcaaccctctgttcgaccacgccgcactgtccgcgcccctgccggcccccagctcaccgcctgcactgccatgacctggaggcagacagacgcccacctgctccccgacctcgaggcccccggggaggggcagggcctggagcttcccactaaaaacatgttttgatgctgtgtgcttttggctgggccttgggctccaggccctgggaccccttgccagggagacccccgaacctttgtgccaggacacctcctggtcccctgcacctctcctgtttggtttagacccccaaactggagggggcatggagaaccgtagagcgcaggaacgggtgggtaattctagagacaaaagccaattaaagtccatttcagacaaaaaaaaaaaaaaaaa

SEQ ID NO: 2 - DNA, 1556 bp, Homo Sapiens
  CDS 261..1166
  sig_peptide 261..314: Von Heijne matrix score 8.80 seq RLVLIILCSVVFS/AV
  polyA_site 1524..1556
cagcccagtcggcccggcccgggggccatggagctccgagcggcgatcgcgagcctcctgcgaaccccagcctgcacgcccggttagcattcggccgggagatgcggcagtggaatctggaagggcggtgaaaaacctacgtcctgccctcgcccggcctctccattcgtcccccgggtagagaggtgcccggctcccaccccttcccagccccagccctggagacagcagcccctagactactgagggacagcgacagcatgaaggctccgggtcggctcgtgctcatcatcctgtgctccgtggtcttctctgccgtctacatcctcctgtgctgctgggccggcctgcccctctgcctggccacctgcctggaccaccacttccccacaggctccaggcccactgtgccgggacccctgcacttcagtggatatagcagtgtgccagatgggaagccgctggtccgcgagccctgccgcagctgtgccgtggtgtccagctccggccaaatgctgggctcaggcctgggtgctgagatcgacagtgccgagtgcgtgttccgcatgaaccaggcgcccaccgtgggctttgaggcggatgtgggccagcgcagcaccctgcgtgtcgtctcacacacaagcgtgccgctgctgctgcgcaactattcacactacttccagaaggcccgagacacgctctacatggtgtggggccagggcaggcacatggaccgggtgctcggcggccgcacctaccgcacgctgctgcagctcaccaggatgtaccccggcctgcaggtgtacaccttcacggagcgcatgatggcctactgcgaccagatcttccaggacgagacgggcaagaaccggaggcagtcgggctccttcctcagcaccggctggttcaccatgatcctcgcgctggagctgtgtgaggagatcgtggtctatgggatggtcagcgacagctactgcagggagaagagccacccctcagtgccttaccactactttgagaagggccggctagatgagtgtcagatgtacctggcacacgagcaggcgccccgaagcgcccaccgcttcatcactgagaaggcggtcttctcccgctgggccaagaagaggcccatcgtgttcgcccatccgtcctggaggactgagtagcttccgtcgtcctgccagccgccatgccgttgcgaggcctccgggatgtcccatcccaagccatcacactccactccctgagtaattcatggcatttgggggctcaccacctccaggtctgtcaagtggcctttgtccctggggctgatggcccccaactcaccagcatcatgaccttgtgccagtcctggtcctccctccccagccgcccctaccaccttttggtgccacacttctcaggctggccgccctggttggggcagccgagagcctggggttcattggtgaaggggccttggagttgtgactgccggggccgtatcaggaacgtacgggtaaacgtgtgttttctggaaaaaaaaaaaaaaacaaaaaaaaaaaaaaaaa

SEQ ID NO: 3 - DNA, 1058 bp, Homo Sapiens
  CDS 67..813
  sig_peptide 67..111: Von Heijne matrix score 5.20 seq QLWKLVLLCGVLT/GT
  polyA_signal 1023..1028
  polyA_site 1042..1058
agcagactgtgcagtggggcaaggatttcatgagcatcctcctctaaacgcgtgacaagacaaaagatgcttcagctttggaaacttgttctcctgtgcggcgtgctcactgggacctcagagtctcttcttgacaatcttggcaatgacctaagcaatgtcgtggataagctggaacctgttcttcacgagggacttgagacagttgacaatactcttaaaggcatccttgagaaactgaaggtcgacctaggagtgcttcagaaatccagtgcttggcaactggccaagcagaaggcccaggaagctgagaaattgctgaacaatgtcatttctaagctgcttccaactaacacggacatttttgggttgaaaatcagcaactccctcatcctggatgtcaaagctgaaccgatcgatgatggcaaaggccttaacctgagcttccctgtcaccgcgaatgtcactgtggccgggcccatcattggccagattatcaacctgaaagcctccttggacctcctgaccgcagtcacaattgaaactgatccccagacacaccagcctgttgccgtcctgggagaatgcgccagtgacccaaccagcatctcactttccttgctggacaaacacagccaaatcatcaacaagttcgtgaatagcgtgatcaacacgctgaaaagcactgtatcctccctgctgcagaaggagatatgtccactgatccgcatcttcatccactccctggatgtgaatgtcattcagcaggtcgtcgataatcctcagcacaaaacccagctgcaaaccctcatctgaagaggacgaatgaggaggaccactgtggtgcatgctgattggttcccagtggcttgccccacccccttatagcatctccctccaggaagctgctgccaccacctaaccagcgtgaaagcctgagtcccaccagaaggaccttcccagataccccttctcctcacagtcagaacagcagcctctacacatgttgtcctgcccctggcaataaaggcccatttctgcaaaaaaaaaaaaaaaaa

SEQ ID NO: 4 - DNA, 648 bp, Homo Sapiens
  CDS 187..438
  polyA_signal 612..617
  polyA_site 632..648
agtgcgcactggcgtgcgagactcggcgggcgctgttgagggagtcgggccgcgactgtggtcgtttttataccttcccgcgcggacgccggcgctgccaacggaagggcggagacggagtttcgtcatgttggccaggcccatttgagatctttgaagatatcctcaacgtgaggctctgctgccatgaaggtgaagattaagtgctggaacggcgtggccacttggctctgggtggccaacgatgagaactgtggcatctgcaggatggcatttaacggatgctgccctgactgcaaggtgcccggcgacgactgcccgctggtgtggggccagtgctcccactgcttccacatgcattgcatcctcaagtggctgcacgcacagcaggtgcagcagcactgccccatgtgccgccaggaatggaagttcaaggagtgaggcccgacctggctctcgctggaggggcatcctgagactccttcctcatgctggcgccgatggctgctggggacagcgcccctgagctgcaacaaggtggaaacaagggctggagctgcgtttgttttgccatcactatgttgacacttttatccaataagtgaaaactcattaaactactcaaatctcgaaaaaaaaaaaaaaaaa

SEQ ID NO: 5 - DNA, 2104 bp, Homo Sapiens
  CDS 92..1753
  sig_peptide 92..130: Von Heijne matrix score 3.90 seq MLYLQGWSMPAVA/EV
  polyA_signal 2070..2075
  polyA_site 2090..2104
  misc_feature 905: n=a, g, c or t
  unsure 259: Xaa = Asp,His,Asn,Tyr
atagactttatcatacttcgtagcatccagtatgttttctttgctaagattattgattttgtattgaagggtcccatgtccatcgttttcaatgctttatctccagggttggagcatgcctgctgtggcagaggtaaaacttcgagatgatcaatatacactggaacacatgcatgcttttggaatgtataattacctgcactgtgattcatggtatcaagacagtgtctactatattgatacccttggaagaattatgaatttaacagtaatgctggacactgccttaggaaaaccacgagaggtgtttcgacttcctacagatttgacagcatgtgacaaccgtctttgtgcatctatccatttctcatcttctacctgggttaccttgtcagatggaactggaagattgtatgtcattggaacaggtgaacgtggaaatagcgcttctgaaaaatgggagattatgtttaatgaagaacttggggatccttttattataattcacagtatctcactgctaaatgctgaagaacattctatagctaccctacttcttcgaatagagaaagaggaattggatatgaaaggaagtggtttctatgtttctctggagtgggtcactatcagtaagaaaaatcaagataataaaaaatatgaaattattaagcgtgatattctccgtggaaagtcagtgccacattatgctgctattaagcctgatggaaatggtctaatgattgtatcctacaagtctttaacatttgttcaggctggtcaagatcttgaagaaaatatggatgaagacatatcagagaaaatcaaagaacctctgtattactggcaacagactgaagatgatttgacagtaaccatacggcttccagaagacagtactaaggagnacattcaaatacagtttttgcctgatcacatcaacattgtactgaaggatcaccagtttttagaaggaaaactctattcatctattgatcatgaaagcagtacatggataattaaagagagtaatagcttggagatttccttgattaagaagaatgaaggactgacctggccagagctagtaattggagataaacaaggggaacttataagagattcagcccagtgtgctgcaatagctgaacgtttgatgcatttgacctctgaagaactgaatccaaatccagataaagaaaaaccaccttgcaatgctcaagagttagaagaatgtgatattttctttgaagagagctccagtttatgcagatttgatggcaatacattaaaaactactcatgtggtgaatcttggaagcaaccagtaccttttctctgtcatagtggatcctaaagaaatgccctgcttctgtttgcgccatgatgttgatgccctactctggcaaccacactccagcaaacaagatgatatgtgggagcacatcgcaactttcaatgctttaggctatgtccaagcatcaaagagagacaaaaaattttttgcctgtgctccaaattactcgtatgcagccctttgtgagtgccttcgtcgagtattcatctatcgtcagcctgctcccatgtccactgtactttacaacagaaaggaaggcaggcaagtaggacaggttgctaagcagcaagtagcaagcctagaaaccaatgatcctattttaggatttcaggcaacaaatgagagattatttgttcttactaccaaaaacctctttttaataaaagtaaatacagagaattaattattctaacatattggcctctttgtactggaaaagtattcagtggtacctggaggtctggacagttatactgtaacctcttaagttttaatgtgctaaatatatcttgtatgattttttattttttaataacattggaaatatattcaagagattatgattctgtaaagctgtggaatgaagctgcagatttagagaacattggcttctgaaaaaaaaaaagagtgaagatagtactagcaagtatacttattttttaaaacaggctagaatctcatgttttatatgaaagatgtacaattcagtgtttaaaaataaaaatatttattgtgtaaaaaaaaaaaaaaa

SEQ ID NO: 6 - DNA, 515 bp, Homo Sapiens
  CDS 144..440
  sig_peptide 144..287: Von Heijne matrix score 4.10 seq VFMLIVSVLALIP/ET
  polyA_signal 457..462
  polyA_site 500..515
  misc_feature 60: n=a, g, c or t
agagagcgggaagccgagctgggcgagaagtaggggagggcggtgctccgcgcggtggcngttgctatcgcttcgcagaacctactcaggcagccagctgagaagagttgagggaaagtgctgctgctgggtctgcagacgcgatggataacgtgcagccgaaaataaaacatcgccccttctgcttcagtgtgaaaggccacgtgaagatgctgcggctggatattatcaactcactggtaacaacagtattcatgctcatcgtatctgtgttggcactgataccagaaaccacaacattgacagttggtggaggggtgtttgcacttgtgacagcagtatgctgtcttgccgacggggcccttatttaccggaagcttctgttcaatcccagcggtccttaccagaaaaagcctgtgcatgaaaaaaaagaagttttgtaattttatattactttttagtttgatactaagtattaaacatatttctgtattcttccaaaaaaaaaaaaaaat

SEQ ID NO: 7 - DNA, 661 bp, Homo Sapiens
  CDS 174..443
  sig_peptide 174..269: Von Heijne matrix score 4.10 seq SSLAFCQVGFLTA/QP
  polyA_signal 623..628
  polyA_site 647..661
aaaaaggaactttcagtgataatgaacaaaactcaggagctatgtggatgacaggagcacctagatgaccgactttacccacttcaaatgctaccttgaccctagcactctctccaccctgcatcctcacctcagaccatcagttggttaggccaacagctcaccatcaattcatgccctgcctagaccaacagctcactgttcatgccctaccctgccctgcccagccctcctctctggccttctgccaagtggggttcttaacagcacagccttcacctccgagaaggcgcaatgggaaagacagatacacgttggttctgcaacaccaggaatgccaggatgatttagccacctcctcacttgtctacctttccctcccctgcttcaaagacttgggtcgatcgaagcaccaaagcatcactgttgctgacactaacaagtagtgccaagggattgcctttaaggaagatcaggagcggaacatctggtggcaaagaaaatctttctaatagccccattctagtgaccaccttcaacctcctcatagcaggagagtttgggagtaggggacttaggatgttttgttcttttaatcaattcagaaaatatgtatgtttgaaataaaaataaaaatacttgagccaaaaaaaaaaaaaaa

SEQ ID NO: 8 - DNA, 694 bp, Homo Sapiens
  CDS 55..399
  sig_peptide 55..192: Von Heijne matrix score 4.70 seq ILTGLTVGSAADA/GE
  polyA_signal 654..659
  polyA_site 680..694
aatgcttgaggaaaactgggaacagtatattgttctgaaaacctaaaaagtttaatgaaaaccttgttcaatccagcccctgccattgctgacctggatccccagttctacaccctctcagatgtgttctgctgcaatgaaagtgaggctgagattttaactggcctcacggtgggcagcgctgcagatgctggggaggctgcattagtgctcttgaaaaggggctgccaggtggtaatcattaccttaggggctgaaggatgtgtggtgctgtcacagacagaacctgagccaaagcacattcccacagagaaagtcaaggctgtggataccacgtgtagacctggctcaagacccaagagtgaagcagcaagtgtgaagaagcagaaacattataaataacccagagaatccttttataacagcaactgcctactgattttgtggcctaacagctcgagcaaaaatgaatataaatacaacattgtgcaatgactaattactcaaaattttgtgcatcagcagaagtggaacctgtggttggtgctaatattatgaaatgcctttgctgtttaataatctggtagctctgtattatttagcatgcatttttcttggagaacaatgattttatttcaagtacctctcactgaaataaaaaagcagctgttagaagacgaaaaaaaaaaaaaaa

SEQ ID NO: 9 - DNA, 1110 bp, Homo Sapiens
  CDS 90..287
  sig_peptide 90..146: Von Heijne matrix score 9.30 seq VFVFLFLWDPVLA/GI
  polyA_signal 1078..1083
  polyA_site 1096..1110
atcatcttacatcagcacaagaagaagagtgagcatagcacaccgatgtcagaccctgccactagcctccttaacagaagttcccagccatgaagcctctccttgttgtgtttgtctttcttttcctttgggatccagtgctggcaggtataaattcattatcatcagaaatgcacaagaaatgctataaaaatggcatctgcagacttgaatgctatgagagtgaaatgttagttgcctactgtatgtttcagctggagtgctgtgtcaaaggaaatcctgcaccctgacataagaaaccaatgaatggccactatcctgtaggcccttgattctgccatctttcacaaaaccagggaatttagatcaaactgtgacaccatgatgtgtccatgactactggtttttagcatttttataggccagcagactcttgtggtcttaaatttaaagagctgagctgtagccttctttaaaagagctcggtttttcacaaaaacaatgtagaagatattttctcacctcaacgtgatgtccagtgtgctcatcagcacctgtttctccctctaatcatagaggatattcttattatttagaaaggcttcaagggaaacaacttttggcacctaagtcgtgtcctaccttcgcttcagcttcgcatttcccatttctgtgaaattcccaactttagagaagcagatttgccatggccttctgacaaccttgtacatctctcacataaaccgcataggcagggcttaactacaggctggcccgagtctggactgagtctgaccctgaagttcctttggaacaggagaggccatcttgtgatgggctggaacaaggtaatttctcatccacctccctagtttcagttgagcaatggaacttcccacctgagcccctagggttcagctacaggctataagactgccgtcctgtggtttagtgttggttccttagcagcagagtgatgccacctctgctgcccgtcatctgactcctctggatgggtgttatcctgtggcttaagagctaacaccatgctgatcttgctttgctatatgtgtaactaataaactgcctaaatgcaaaaaaaaaaaaaaa

SEQ ID NO: 10 - DNA, 623 bp, Homo Sapiens
  CDS 49..447
  sig_peptide 49..111: Von Heijne matrix score 5.00 seq LIVIFFYCWLSSS/HE
  polyA_signal 579..584
  polyA_site 602..623
attagaattttctttctcaaattaaaggtttgagaaattcgtgatgagatgtcctgttccctaaagtttactttgattgtaatttttttttactgttggctttcatccagccatgaggagttagaaggtggtacatcgaagtcttttgacctccatacagtgattatgcttgtcatcgctggtggtatcctggcggccttgctcctgctgatagttgtcgtgctctgtctttacttcaaaatacacaacgcgctaaaagctgcaaaggaacctgaagctgtggctgtaaaaaatcacaacccagacaaggtgtggtgggccaagaacagccaggccaaaaccattgccacggagtcttgtcctgccctgcagtgctgtgaaggatatagaatgtgtgccagttttgattccctgccaccttgctgttgcgacataaatgagggcctctgagttaggaaaggtgggcacaaaaatcttcatgagcaatacttcttagtagattgttttgttattcaaatcaagttctagtgtttttatgtgagattatataatttacagtgttgttttatatacttttgaataaatgtacactattaaaaataaaaaaaaaaaaaaatgccaaa

SEQ ID NO: 11 - DNA, 657 bp, Homo Sapiens
  CDS 199..618
  sig_peptide 199..408: Von Heijne matrix score 3.90 seq FKVLTQPLSLLWG/CD
  polyA_signal 626..631
  polyA_site 643..657
aactggatagagtactgcccccttcagcccatggagaaaggcaaatgcctccttcagagtctacctaatgctttctcagataaataagcatgaagaaaagtcaaagtccattctagctctaaaataaggaatgaaatgttttcctgatatgattttttgttttcatctgataataattttatatatcacagaaacagcatggttcttactaaacctcttcaaagaaatggcagcatgatgagctttgaaaatgtgaaagaaaagagcagagaaggagggccccatgcacacacacccgaagaagaattgtgtttcgtggtaacacactaccctcaggttcagaccacactcaacctgtttttccatatattcaaggttcttactcaaccactttcccttctgtggggttgtgatcagaagcctcgtactgttcctacccttggaaacggcgcatgggatacctgccaacaacacatacgcacttcatcatggacagcaaacacactcgtcattcaaaaccagcattcacgggaaagcactgtttctgtttgcctttttatgttaatccgcatgcaacatattttgaaaacagatacacttcaacagttcagaatatgctagtactaataaaaccaacatgttaaaaaaaaaaaaaaa

SEQ ID NO: 12 - DNA, 1137 bp, Homo Sapiens
  CDS 271..969
  sig_peptide 271..366: Von Heijne matrix score 5.60 seq WMGLACFRSLAAS/SP
  polyA_signal 1092..1097
  polyA_site 1123..1137
aaaaacctttcaagtgccccctcctttccttaaagtcttttataggggtccccttcttggccatctccatcctgtgagtcaggactgaaagggcacagacaggtcactgccagcattgttggggcaagcctgcaagcacgcatcactggggatctgacatgacaatggccgcctgccccctctgagggctacaggacttaccccagtgggaagcagctaagcaggtctgaccagccgacctggacctggccaagggtcctgtcatccctcatggccaccccgccattccggctgataaggaagatgttttccttcaaggtgagcagatggatggggcttgcctgcttccggtccctggcggcatcctctcccagtattcgccagaagaaactaatgcacaagctgcaggaggaaaaggcttttcgcgaagagatgaaaatttttcgtgaaaaaatagaggacttcagggaagagatgtggactttccgaggcaagatccatgctttccggggccagatcctgggtttttgggaagaggagagacctttctgggaagaggagaaaaccttctggaaagaggaaaaatccttctgggaaatggaaaagtctttcagggaggaagagaaaactttctggaaaaagtaccgcactttctggaaggaggataaggccttctggaaagaggacaatgccttatgggaaagagaccggaaccttcttcaggaggacaaggccctgtgggaggaagaaaaggccctgtgggtagaggaaagagccctccttgagggggagaaagccctgtgggaagataaaacgtccctctgggaggaagagaatgccctctgggaggaagagagggccttctggatggagaacaatggccacattgccggagagcagatgctcgaagatgggccccacaacgccaacagagggcagcgcttgctggccttctcccgaggcagggcgtagccagcatgcaggtgcagggccctgtggtccagactcccctgggttgggattcaagtccagggtgagcccatgtgctggagaaaatacacactcattggtctccttgctttgaaagatccaataaagtcctgaggcaaggtttggaaaaccaaaaaaaaaaaaaaa

SEQ ID NO: 13 - DNA, 636 bp, Homo Sapiens
  CDS 192..440
  sig_peptide 192..278: Von Heijne matrix score 5.20 seq VVFMTVAAGGASS/FA
  polyA_signal 590..595
  polyA_site 622..636
aaaagcgagtcaggtccctcgcgctcccgccccacgcgcgtgaccagagcgcgctggcccggcccacccggggcggttgtggtcgctatatataaggtggggaggccgccggcccgttcggttccgggcgttaccatcgtccgtgcgcaccgcccggcgtccagatttggcaattcttcgctgaagtcatcatgagctttttccaactcctgatgaaaaggaaggaactcattcccttggtggtgttcatgactgtggcggcgggtggagcctcatctttcgctgtgtattctctttggaaaaccgatgtgatccttgatcgaaaaaaaaatccagaaccttgggaaactgtggaccctactgtacctcaaaagcttataacaatcaaccaacaatggaaacccattgaagagttgcaaaatgtccaaagggtgaccaaatgacgagccctcgcctctttcttctgaagagtactctataaatctagtggaaacatttctgcacaaactagattctggacaccagtgtgcggaaatgcttctgctacatttttagggtttgtctacattttttgggctctggataaggaattaaaggagtgcagcaataactgcactgtccaaaaaaaaaaaaaaa

SEQ ID NO: 14 - DNA, 818 bp, Homo Sapiens
  CDS 59..703
  sig_peptide 59..181: Von Heijne matrix score 6.80 seq LVSCLSSQSSALS/QS
  polyA_signal 783..788
  polyA_site 804..818
gacatcttgagctgaagcagggttttgagccactgctgctgctgctgccattgtcaccatggtctcagctctgcggggagcacccctgatcagggtgcactcaagccctgtttcttctccttctgtgagtggaccacggaggctggtgagctgcctgtcatcccaaagctcagctctgagccagagtggtggtggctccacctctgccgccggcatagaagccaggagcagggctctcagaaggcggtggtgcccagctgggatcatgttgttggccctggtctgtctgctcagctgcctgctaccctccagtgaggccaagctctacggtcgttgtgaactggccagagtgctacatgacttcgggctggacggataccggggatacagcctggctgactgggtctgccttgcttatttcacaagcggtttcaacgcagctgctttggactacgaggctgatgggagcaccaacaacgggatcttccagatcaacagccggaggtggtgcagcaacctcaccccgaacgtccccaacgtgtgccggatgtactgctcagatttgttgaatcctaatctcaaggataccgttatctgtgccatgaagataacccaagagcctcagggtctgggttactgggaggcctggaggcatcactgccagggaaaagacctcactgaatgggtggatggctgtgacttctaggatggacggaaccatgcacagcaggctgggaaatgtggtttggttcctgacctaggcttgggaagacaagccagcgaataaaggatggttgaacgtgaaaaaaaaaaaaaaa

SEQ ID NO: 15 - DNA, 1888 bp, Homo Sapiens
  CDS 139..1389
  sig_peptide 139..198: Von Heijne matrix score 5.00 seq HLLAGFCVWVVLG/WV
  polyA_signal 1854..1859
  polyA_site 1873..1888
cccccccagctggaaccaagaaggttgtgtcccccttcctctgggtgtccttgtctcctgctatcagggcacagtcctcaggatgtttcggggagaataggagccagaacctgagcccctaagccattcccctcaccaatgatggggtccccagtgagtcatctgctggccggcttctgtgtgtgggtcgtcttgggctgggtagggggctcagtccccaacctgggccctgctgagcaggagcagaaccattacctggcccagctgtttggcctgtacggcgagaatgggacgctgactgcagggggcttggcgcggcttctccacagcctggggctaggccgagttcaggggcttcgcctgggacagcatgggcctctgactggacgggctgcatccccagctgcagacaattccacacacaggccacagaaccctgagctgagtgtggatgtctgggcagggatgcctctgggtccctcagggtggggtgacctggaagagtcaaaggcccctcacctaccccgtgggccagccccctcgggcctggacctccttcacaggcttctgttgctggaccactcattggctgaccacctgaatgaggattgtctgaacggctcccagctgctggtcaattttggcttgagccccgctgctcctctgacccctcgtcagtttgctctgctgtgcccagccctgctttatcagatcgacagccgcgtctgcatcggcgctccggcccctgcacccccaggggatctactatctgccctgcttcagagtgccctggcagtcctgttgctcagcctcccttctcccctatccctgctgctgctgcggctcctgggacctcgtctactacggcccttgctgggcttcctgggggccctggcggtgggcactctttgtggggatgcactgctacatctgctaccgcatgcacaagaagggcggcacgcaggacctggcggactaccagagaaggacctgggcccggggctgtcagtgctcggaggcctcttcctgctctttgtgctggagaacatgctggggcttttgcggcaccgagggctcaggccaagatgctgcaggcgaaaacgaaggaatctcgaaacacgcaacttggatccggagaatggcagtgggatggcccttcagcccctacaggcagctccagagccaggggctcagggccagagggagaagaacagccagcacccaccagctctggcccctcctgggcaccaaggccacagtcatgggcaccagggtggcactgatatcacgtggatggtcctcctgggagatggtctacacaacctcactgatgggctggccataggtgctgccttctctgatggcttctccgcggcctcagtaccaccttagcggtcttctgccatgagctgccccacgaactgggtgactttgccatgctgctccagtcagggctgtcctttcggcggctgctgctgctgagcctcgtgtctggagccctgggattggggggtgcagtcctgggggtggggctcagcctgggccctgtccccctcactccctgggtgtttggggtcactgctggggtcttcctctatgtggcccttgtggacatgctaccagccctgcttcgtcctccggagcccctgcctacgccccatgtgctcctgcaggggctggggctgctgctggggggcggcctcatgcttgccataaccctgctggaggagcggctactgcccgtgaccactgagggctgatggggccagtggaaaggggtcgggttgcccttccttccccccaaccacaggaatggaggcgggacacagggccagtaggagcaataggattttaataaacagaacccatcccaaaaaaaaaaaaaaaa

SEQ ID NO: 16 - DNA, 1894 bp, Homo Sapiens
  CDS 21..1118
  sig_peptide 21..89: Von Heijne matrix score 10.80 seq ALALLSAFSATQA/RK
  polyA_signal 1858..1863
  polyA_site 1879..1894
  misc_feature 1695: n=a, g, c or t
agacgtgagcagagcagataatggcaagcatggctgccgtgctcacctgggctctggctcttctttcagcgttttcggccacccaggcacggaaaggcttctgggactacttcagccagaccagcggggacaaaggcagggtggagcagatccatcagcagaagatggctcgcgagcccgcgaccctgaaagacagccttgagcaagacctcaacaatatgaacaagttcctggaaaagctgaggcctctgagtgggagcgaggctcctcggctcccacaggacccggtgggcatgcggcggcagctgcaggaggagttggaggaggtgaaggctcgcctccagccctacatggcagaggcgcacgagctggtgggctggaatttggagggcttgcggcagcaactgaagccctacacgatggatctgatggagcaggtggccctgcgcgtgcaggagctgcaggagcagttgcgcgtggtgggggaagacaccaaggcccagttgctggggggcgtggacgaggcttgggctttgctgcagggactgcagagccgcgtggtgcaccacaccggccgcttcaaagagctcttccacccatacgccgagagcctggtgagcggcatcgggcgccacgtgcaggagctgcaccgcagtgtggctccgcacgcccccgccagccccgcgcgcctcagtcgctgcgtgcaggtgctctcccggaagctcacgctcaaggccaaggccctgcacgcacgcatccagcagaacctggaccagctgcgcgaagagctcagcagagcctttgcaggcactgggactgaggaaggggccggcccggacccccagatgctctccgaggaggtgcgccagcgacttcaggctttccgccaggacacctacctgcagatagctgccttcactcgcgccatcgaccaggagactgaggaggtccagcagcagctggcgccacctccaccaggccacagtgccttcgccccagagtttcaacaaacagacagtggcaaggttctgagcaagctgcaggcccgtctggatgacctgtgggaagacatcactcacagccttcatgaccagggccacagccatctgggggacccctgaggatctacctgcccaggcccattcccagctccttgtctggggagccttggctctgagcctctagcatggttcagtccttgaaagtggcctgttgggtggagggtggaaggtcctgtgcaggacagggaggccaccaaaggggctgctgtctcctgcatatccagcctcctgcgactccccaatctggatgcattacattcaccaggctttgcaaacccagcctcccagtgctcatttgggaatgctcatgagttactccattcaagggtgagggagtagggagggagaggcaccatgcatgtgggtgattatctgcaagcctgtttgccgtgatgctggaagcctgtgccactacatcctggagtttggctctagtcacttctggctgcctggtggccactgctacagctggtccacagagaggagcacttgtctccccagggctgccatggcagctatcaggggaatagaagggagaaagagaatatcatggggagaacatgtgatggtgtgtgaatatccctgctggctctgatgctggtgggtacgaaaggtgtgggctgtgataggaganggcagagcccatgtttcctgacatagctctacacctaaataagggactgaaccctcccaactgtgggagctccttaaaccctctggggagcatactgtgtgctctccccatctccagcccctccctctgggttcccaagttgaagcctagacttctggctcaaatgaaatagatgtttatgataaaaaaaaaaaaaaaa

SEQ ID NO: 17 - DNA, 1913 bp, Homo Sapiens
  CDS 143..592
  sig_peptide 143..277: Von Heijne matrix score 5.90 seq VLVDLAILGQAYA/FA
  polyA_signal 1877..1882
  polyA_site 1899..1913
atttttttgtgcctaagatgcccagtgcgttgctgggtttttctgctgtcctcgggctctggacatgaggccagaccttgtgaccttgttggcagtgggcagtggcttgatgtgaggtcccagagacggcaggttcatcaagatggtgctcatgtggaccagtggtgacgccttcaagacggcctacttcctgctgaagggtgcccctctgcagttctccgtgtgcggcctgctgcaggtgctggtggacctggccatcctggggcaggcctacgccttcgccccacccccagaagccggcgccccacgccgtgcaccccactggcaccaaggccctctgacagtggggaggacgaggatgtgggaccgccagccgcgggcactggtgggccctgacctccccgcggggagggtgggtgccgtggcccctgcaggtgtggcagagatggggcacgggcattggggtctccatcagcctctgtggggtgtctcagggtgggcagtgggggtggggctgggacgctgtttgtgctcagcggggacagccagggttgatctggccccgagggttttggatgtttttaggatgacataaaaagcaagtgttttccccatttcctcttatgaaacaccgtctgagcccaaggtacacattgggcggcctgcaggaacctgctccaggtggacacacgggccagcagccgcgaaccttgaagctggggtgaccgcaggagaccctgtaaggcctgtgagcggagccctcgaccccgtgacaccctggccagacaccctgcttggactggggtggcctctgctacccaggggtctggcacgggggagggctggggctttctctgcctggtacacacggaaaggcggctgtgcggacgcagggtcaccgtgctccgggttttctgacagtcggtgtttcctgggcctttggagtggctgcgaggcctgaacgccttgtggatccgctgtgtccagcccggctgagcatcgccagggctagctcatgctgctcttgtcagcctctggttctcctcgagtccttggggacgtggcagatgccagcgaccatcagacaacgtggaggccctcatgggcaatggctgagggggccgggctgaggctgtgcacatgcagtctgcacgccactcttgggctctgctggcggagatccccttccttctgggtgcagactgcacctccggatgcagttttgatgtccatcttccaggagagagacggtctcgggtccagggagtggagggggctgcccctgccgtgcaggtcctggccgatggcgccttaccctgctgccctgggcttttggcctgaagcaaattcctgagtggggggtactggggcctgccgcatcctgtcctgtccactgcccacccccgtgtgctggctccctcacttctggctgcagtgggagccgccagtctgacccttgtcaccgcacgctctgcccccaccccgttgcaagaggtcacaccatgtcagcagccttgcactgaccgcagccggcccccaggcctcagagttctggatgcttccgtgcggctccaacaggcatcgtcttcccttccgcaggtggaggggccgcttcccgcaggcatctgagctctgtgccggggccgtggccatgggaagatgttccacgctgcctcctcctcgagttttcctcggaaacactcttgaatgtctgagtgagggtcctgcttagctctttggcctgtgagatgctttgaaaatttttatttttttaagatgaagcaagatgtctgtagcggtaattgcctcacattaaactgtcgccgactgcaggcgcagtgactgctgaatgtaccctgtgtggcgacttggaatcaataaaccatttgtggatcctaaaaaaaaaaaaaaaa

SEQ ID NO: 18 - DNA, 1744 bp, Homo Sapiens
  CDS 76..999
  sig_peptide 76..279: Von Heijne matrix score 5.10 seq LSLPVCTVSLVSS/VS
  polyA_signal 1711..1716
  polyA_site 1729..1744
  misc_feature 336: n=a, g, c or t
aagttgaggccaccctggtggcaccaaagccctctcaggcaggcagacccagggcctccccgccacaccttgttcatggattttgtcgctggagccatcggaggcgtctgcggtgttgctgtgggctaccccctggacacggtgaaggtcaggatccagacggagccaaagtacacaggcatctggcactgcgtccgggatacgtatcaccgagagcgcgtgtggggcttctaccggggcctctcgctgcccgtgtgcacggtgtccctggtatcttccgtgtcttttggcacctaccgccactgcctggcgcacatctgccggctccggtacggnaaccctgacgccaagcccaccaaggccgacatcacgctctcgggatgcgcctccggcctcgtccgcgtgttcctgacgtcgcccactgaggtggccaaagtccgcttgcagacgcagacacaggcgcagaagcagcagcggctgctttcggcctcggggccgttggctgtgccccccatgtgtcctgtgcccccagcctgcccagagcccaagtaccgcgggccactgcactgcctggccacggtagcccgtgaggaggggctgtgcggcctctacaagggcagctcggccctggtcttacgggacggccactcctttgccacctacttcctttcctacgcggtcctctgcgagtggctcagccccgctggccacagccggccagatgtcccgggcgtgctggtggccgggggctgtgcaggagtcctggcctgggctgtggccacccccatggacgtgatcaagtcgagactgcaggcagacgggcagggccagaggcgctaccggggtctcctgcactgtatggtgaccagcgttcgagaggagggaccccgggtccttttcaaggggctggtactcaattgctgccgcgccttccctgtcaacatggtggtcttcgtcgcctatgaggcagtgctgaggctcgcccggggtctgctcacatagccggtccccacgcccagcggcccacccaccagcagctgctggaggtcgtagtggctggaggaggcaaggggtagtgtggctgggttcgggaccccacagggccattgcccaggagaatgaggagcctccctgcagtgttgtcggccgaggcctaagctcgccctgcccagctactgacctcaggtcgaggggcccgccagccatcagccagggttggcctagggtggcaggagccagggaggagtgggcctctttgatgagagcgttgagttgcatggagtcggttgttcatcccagcctccccatggccctcgcctcccatgtctttgaagcacccctccagggagtcaggtgtgtgctcagccaccctctgccccattcctagaccctcacccccaccactgttcctgtgtcttcatgagctgtcccttacaggcaggggcttcccacaggctgggggcctcggggcggggagcatgagctgggctggcaccacgactgagggctcccggcccggcttcttccccacagcaggctgctcagagggggtgctgccgggactgccatgcccacctgagaggggcctggggtggccgtcctcggccggttagggaatttggggtgaggttcctcaggagccctcactctgcctgtggacgctgcacctgccacttaaagaccccaaagactctgttgggaactgttgtcaataaaatgtttctgaggaaaaaaaaaaaaaaaa

SEQ ID NO: 19 - DNA, 946 bp, Homo Sapiens
  CDS 123..464
  sig_peptide 123..269: Von Heijne matrix score 4.90 seq PSLAAGLLFGSLA/GL
  polyA_signal 908..913
  polyA_site 931..946
aaatcgcgtttccggagagacctggctgctgtgtcccgcggcttgcgctccgtagtggactccgcgggccttcggcagatgcaggcctggggtagtctcctttctggactgagaagagaagaatggagaagcccctcttcccattagtgcctttgcattggtttggctttggctacacagcactggttgtttctggtgggatcgttggctatgtaaaaacaggcagcgtgccgtccctggctgcagggctgctcttcggcagtctagccggcctgggtgcttaccagctgtatcaggatccaaggaacgtttggggtttcctagccgctacatctgttacttttgttggtgttatgggaatgagatcctactactatggaaaattcatgcctgtaggtttaattgcaggtgccagtttgctgatggccgccaaagttggagttcgtatgttgatgacatctgattagcagaagtcatgttccagcttggactcatgaaggattaaaaatctgcatcttccactattttcaatgtattaagagaaataagtgcagcatttttgcatctgacattttacctaaaaaaaaaaagacaccaaatttggcggaggggtggaaaatcagttgttaccattataaccctacagaggtggtgagcatgtaacatgagcttattgagaccatcatagagatcgattcttgtatattgattttatctctttctgtatctataggtaaatctcaagggtaaaatgttaggtgttgacattgagaaccctgaaaccccattccctgctcagaggaacagtgtgaaaaaaaatctcttgagagatttagaatatcttttcttttgctcatcttagaccacagactgactttgaaattatgttaagtgaaatatcaatgaaaataaagtttactataaataattaaaaaaaaaaaaaaaa

SEQ ID NO: 20 - DNA, 1622 bp, Homo Sapiens
  CDS 85..1230
  sig_peptide 85..129: Von Heijne matrix score 10.10 seq LLLPLALCILVLC/CG
  polyA_signal 1589..1594
  polyA_site 1607..1622
aaagtctgccttaaagagccttacaagccagccagtccctgcagctccacaaactgacccatcctgggccttgttctccacagaatgggtctgctccttcccctggcactctgcatcctagtcctgtgctgcggagcaatgtctccaccccagctggccctcaacccctcggctctgctctcccggggctgcaatgactcagatgtgctggcagttgcaggctttgccctgcgggatattaacaaagacagaaaggatggctatgtgctgagactcaaccgagtgaacgacgcccaggaatacagacggggtggcctgggatctctgttctatcttacactggatgtgctagagactgactgccatgtgctcagaaagaaggcatggcaagactgtggaatgaggatattttttgaatcagtttatggtcaatgcaaagcaatattttatatgaacaacccaagtagagttctctatttagctgcttataactgtactcttcgcccagtttcaaaaaaaaagatttacatgacgtgccctgactgcccaagctccatacccactgactcttccaatcaccaagtgctggaggctgccaccgagtctcttgcgaaatacaacaatgagaacacatccaagcagtattctctcttcaaagtcaccagggcttctagccagtgggtggtcggcccttcttactttgtggaatacttaattaaagaatcaccatgtactaaatcccaggccagcagctgttcacttcagtcctccgactctgtgcctgttggtctttgcaaaggttctctgactcgaacacactgggaaaagtttgtctctgtgacttgtgacttctttgaatcacaggctccagccactggaagtgaaaactctgctgttaaccagaaacctacaaaccttcccaaggtggaagaatcccagcagaaaaacacccccccaacagactccccctccaaagctgggccaagaggatctgtccaatatcttcctgacttggatgataaaaattcccaggaaaagggccctcaggaggcctttcctgtgcatctggacctaaccacgaatccccagggagaaaccctggatatttccttcctcttcctggagcctatggaggagaagctggtggtcctgcctttccccaaagaaaaagcacgcactgctgagtgcccagggccagcccagaatgccagccctcttgtccttccgccatgagaatcacacagagtcttctgtaggggtatggtgcgccgcatgacatgggaggcgatggggacgatggacagagacagagcgtgcacacgtagagtggctagtgaaggacgcctttttgactcttcttggtctcagcatgttgactgggattggaaataatgagactgagccctcggcttgggctgcactctaccctgtacactgccttgtaccctgagctgcatcacctcctaaactgagcagtctcataccatggagagatgcctctcttatgtcttcagccactcacttataaagatacttatcttttcagcagtatatatgtgctgaaatctcagcatgaaagcattgcatgagtaaagatactttccctaaaaaaaaaaaaaaaa

SEQ ID NO: 21 - DNA, 715 bp, Homo Sapiens
  CDS 29..664
  sig_peptide 29..619: Von Heijne matrix score 4.80 seq SFFGASFLMGSLG/GM
  polyA_signal 657..662
  polyA_site 699..715
  misc_feature 295,357: n=a, g, c or t
  unsure -88: Xaa = Ala,Asp,Gly,Val
  unsure -109: Xaa = Asp,Glu
cttttcctgcctctgattccgggctgtcatggcgacccccaacaatctgacccccaccaactgcagctggtggcccatctccgcgctggagagcgatgcggccaagccagcggaggcccccgacgctcccgaggcggccagccccgcccattggcccagggagagcctggttctgtaccactggacccagtccttcagctcgcagaaggccaagatcttggagcatgatgatgtgagctacctgaagaagatcctcggggaactggccatggtgctggaccagattgaggcgganctggagaagaggaagctggagaacgaggggcagaaatgcgagctgtggctctgtggctgtgncttcaccctcgctgatgtcctcctgggagccaccctgcaccgcctcaagttcctgggactgtccaagaaatactgggaagatggcagccggcccaacctgcagtccttctttgagagggtccagagacgctttgccttccggaaagtcctgggtgacatccacaccaccctgctgtcggccgtcatccccaatgctttccggctggtcaagaggaaacccccatccttcttcggggcgtccttcctcatgggctccctgggtgggatgggctactttgcctactggtacctcaagaaaaaatacatctagggccaggcctggggcttggtgtctgactgccaaaaaaaaaaaaaaaaa

SEQ ID NO: 22 - DNA, 1549 bp, Homo Sapiens
  CDS 18..878
  sig_peptide 18..95: Von Heijne matrix score 6.30 seq GVGLVTLLGLAVG/SY
  polyA_signal 1500..1505
  polyA_site 1533..1549
  misc_feature 944: n=a, g, c or t
ggaaaaggcgctccgtcatggggatccagacgagccccgtcctgctggcctccctgggggtggggctggtcactctgctcggcctggctgtgggctcctacttggttcggaggtcccgccggcctcaggtcactctcctggaccccaatgaaaagtacctgctacgactgctagacaagacgctctctgcacggtccccaggcaaacatatctacctctccacccgaattgatggcagcctggtcatcaggccatacactcctgtcaccagtgatgaggatcaaggctatgtggatcttgtcatcaaggtctacctgaagggtgtgcaccccaaatttcctgagggagggaagatgtctcagtacctggatagcctgaaggttggggatgtggtggagtttcgggggccaagcgggttgctcacttacactggaaaagggcattttaacattcagcccaacaagaaatctccaccagaaccccgagtggcgaagaaactgggaatgattgccggcgggacaggaatcaccccaatgctacagctgatccgggccatcctgaaagtccctgaagatccaacccagtgctttctgctttttgccaaccagacagaaaaggatatcatcttgcgggaggacttagaggaactgcaggcccgctatcccaatcgctttaagctctggttcactctggatcatcccccaaaagattgggcctacagcaagggctttgtgactgccgacatgatccgggaacacctgcccgctccaggggatgatgtgctggtactgctttgtgggccacccccaatggtgcagctggcctgccatcccaacttggacaaactgggctactcacaaaagatgcgattcacctactgagcatcctccagcttccctggtgctgttcgctgcagttgttccccatcagtactcaagcactanaagccttagattcctttcctcagagtttcaggttttttcagttacatctagagctgaaatctggatagtacctgcaggaacaatattcctgtagccatggaagagggccaaggctcagtcactccttggatggcctcctaaatctccccgtggcaacaggtccaggagaggcccatggagcagtctcttccatggagtaagaaggaagggagcatgtacgcttggtccaagattggctagttccttgatagcatcttactctcaccttctttgtgtctgtgatgaaaggaacagtctgtgcaatgggttttacttaaacttcactgttcaacctatgagcaaatctgtatgtgtgagtataagttgagcatagcatacttccagaggtggtcttatggagatggcaagaaaggaggaaatgatttcttcagatctcaaaggagtctgaaatatcatatttctgtgtgtgtctctctcagcccctgcccaggctagagggaaacagctactgataatcgaaaactgctgtttgtggcaggaacccctggctgtgcaaataaatggggctgaggcccctgtgtgatattcaaaaaaaaaaaaaaaaa

SEQ ID NO: 23 - DNA, 1328 bp, Homo Sapiens
  CDS 73..1008
  sig_peptide 73..147: Von Heijne matrix score 14.10 seq LTLLLLLTLLAFA/GY
  polyA_signal 1286..1291
  polyA_site 1312..1328
actgcgcggatcggcgtccgcagcgggcggctgctgagctgccttgaggtgcagtgttggggatccagagccatgtcggacctgctactactgggcctgattgggggcctgactctcttactgctgctgacgctgctagcctttgccgggtactcagggctactggctggggtggaagtgagtgctgggtcaccccccatccgcaacgtcactgtggcctacaagttccacatggggctctatggtgagactgggcggcttttcactgagagctgcatctctcccaagctccgctccatcgctgtctactatgacaacccccacatggtgccccctgataagtgccgatgtgccgtgggcagcatcctgagtgaaggtgaggaatcgccctcccctgagctcatcgacctctaccagaaatttggcttcaaggtgttctccttcccggcacccagccatgtggtgacagccaccttcccctacaccaccattctgtccatctggctggctacccgccgtgtccatcctgccttggacacctacatcaaggagcggaagctgtgtgcctatcctcggctggagatctaccaggaagaccagatccatttcatgtgcccactggcacggcagggagacttctatgtgcctgagatgaaggagacagagtggaaatggcgggggcttgtggaggccattgacacccaggtggatggcacaggagctgacacaatgagtgacacgagttctgtaagcttggaagtgagccctggcagccgggagacttcagctgccacactgtcacctggggcgagcagccgtggctgggatgacggtgacacccgcagcgagcacagctacagcgagtcaggtgccagcggctcctcttttgaggagctggacttggagggcgaggggcccttaggggagtcacggctggaccctgggactgagcccctggggactaccaagtggctctgggagcccactgcccctgagaagggcaaggagtaacccatggcctgcaccctcctgcagtgcagttgctgaggaactgagcagactctccagcagactctccagccctcttcctccttcctctgggggaggaggggttcctgagggacctgacttcccctgctccaggcctcttgctaagccttctcctcactgccctttaggctcccagggccagaggagccagggactattttctgcaccagcccccagggctgccacccctgttgtgtctttttttcagactcacagtggagcttccaggacccagaataaagccaatgatttacttgtttcaaaaaaaaaaaaaaaaa

SEQ ID NO: 24 - DNA, 1515 bp, Homo Sapiens
  CDS 165..842
  sig_peptide 165..251: Von Heijne matrix score 7.00 seq LASFAALVLVCRQ/RY
  polyA_signal 1474..1479
  polyA_site 1500..1515
agtcgcgggatgcgcccgggagccacagcctgaggccctcaggtctctgcaggtgtcgtggaggaacctagcacctgccatcctcttccccaatttgccacttccagcagctttagcccatgaggaggatgtgaccgggactgagtcaggagccctctggaagcatggagactgtggtgattgttgccataggtgtgctggccaccatctttctggcttcgtttgcagccttggtgctggtttgcaggcagcgctactgccggccgcgagacctgctgcagcgctatgattctaagcccattgtggacctcattggtgccatggagacccagtctgagccctctgagttagaactggacgatgtcgttatcaccaacccccacattgaggccattctggagaatgaagactggatcgaagatgcctcgggtctcatgtcccactgcattgccatcttgaagatttgtcacactctgacagagaagcttgttgccatgacaatgggctctggggccaagatgaagacttcagccagtgtcagcgacatcattgtggtggccaagcggatcagccccagggtggatgatgttgtgaagtcgatgtaccctccgttggaccccaaactcctggacgcacggacgactgccctgctcctgtctgtcagtcacctggtgctggtgacaaggaatgcctgccatctgacgggaggcctggactggattgaccagtctctgtcggctgctgaggagcatttggaagtccttcgagaagcagccctagcttctgagccagataaaggcctcccaggccctgaaggcttcctgcaggagcagtctgcaatttagtgcctacaggccagcagctagccatgaaggcccctgccgccatccctggatggctcagcttagccttctactttttcctatagagttagttgttctccacggctggagagttcagctgtgtgtgcatagtaaagcaggagatccccgtcagtttatgcctcttttgcagttgcaaactgtggctggtgagtggcagtctaatactacagttaggggagatgccattcactctctgcaagaggagtattgaaaactggtggactgtcagctttatttagctcacctagtgttttcaagaaaattgagccaccgtctaagaaatcaagaggtttcacattaaaattagaatttctggcctctctcgatcggtcagaatgtgtggcaattctgatctgcattttcagaagaggacaatcaattgaaactaagtaggggtttcttcttttggcaagacttgtactctctcacctggcctgtttcatttatttgtattatctgcctggtccctgaggcgtctgggtctctcctctcccttgcaggtttgggtttgaagctgaggaactacaaagttgatgatttcttttttatctttatgcctgcaattttacctagctaccactaggtggatagtaaatttatacttatgtttcccccaaaaaaaaaaaaaaaa

SEQ ID NO: 25 - DNA, 1622 bp, Homo Sapiens
  CDS 31..1248
  sig_peptide 31..135: Von Heijne matrix score 6.30 seq TLLLFAAPFGLLG/EK
  polyA_signal 1580..1585
  polyA_site 1607..1622
aacctcttccgtcggctgaattgcggccgtatgcgcggctctgtggagtgcacctggggttgggggcactgtgcccccagccccctgctcctttggactctacttctgtttgcagccccatttggcctgctgggggagaagacccgccaggtgtctctggaggtcatccctaactggctgggccccctgcagaacctgcttcatatacgggcagtgggcaccaattccacactgcactatgtgtggagcagcctggggcctctggcagtggtaatggtggccaccaacaccccccacagcaccctgagcgtcaactggagcctcctgctatcccctgagcccgatgggggcctgatggtgctccctaaggacagcattcagttttcttctgcccttgtttttaccaggctgcttgagtttgacagcaccaacgtgtccgatacggcagcaaagcctttgggaagaccatatcctccatactccttggccgatttctcttggaacaacatcactgattcattggatcctgccaccctgagtgccacatttcaaggccaccccatgaacgaccctaccaggacttttgccaatggcagcctggccttcagggtccaggccttttccaggtccagccgaccagcccaaccccctcgcctcctgcacacagcagacacctgtcagctagaggtggccctgattggagcctctccccggggaaaccgttccctgtttgggctggaggtagccacattgggccagggccctgactgcccctcaatgcaggagcagcactccatcgacgatgaatatgcaccggccgtcttccagttggaccagctactgtggggctccctcccatcaggctttgcacagtggcgaccagtggcttactcccagaagccggggggccgagaatcagccctgccctgccaagcttcccctcttcatcctgccttagcatactctcttccccagtcacccattgtccgagccttctttgggtcccagaataacttctgtgccttcaatctgacgttcggggcttccacaggccctggctattgggaccaacactacctcagctggtcgatgctcctgggtgtgggcttccctccagtggacggcttgtccccactagtcctgggcatcatggcagtggccctgggtgccccagggctcatgctgctagggggcggcttggttctgctgctgcaccacaagaagtactcagagtaccagtccataaattaaggcccgctctctggagggaaggacattactgaacctgtcttgctgtgcctcgaaactctggaggttggagcatcaagttccagcccccttcactcccccatcttgcttttctgtggaacctcagaggccagcctcgacttcctggagacccccaggtggggcttccttcatactttgttgggggactttggaggcgggcaggggacagggctattgataaggtccccttggtgttgccttcttgcatctccacacatttcccttggatgggacttgcaggcctaaatgagaggcattctgactggttggctgccctggaaggcaagaaaatagatttatttttttttcacagggcaaaaaaaaaaaaaaaa

SEQ ID NO: 26 - DNA, 1448 bp, Homo Sapiens
  CDS 131..490
  sig_peptide 131..301: Von Heijne matrix score 5.30 seq AIALATVLFLIGA/FL
  polyA_signal 1411..1416
  polyA_site 1434..1448
ctgatcccgcctggggccggctgagtggcacttaagcgggccatgccatgcaaccttgggcgctgccaaccgtgggcgagctctgggtgtgcgggcggcctcgcgcggcgctccgctgtgtcagcgtgttatgatgccgtcccgtaccaacctggctactggaatccccagtagtaaagtgaaatattcaaggctctccagcacagacgatggctacattgaccttcagtttaagaaaacccctcctaagatcccttataaggccatcgcacttgccactgtgctgtttttgattggcgcctttctcattattataggctccctcctgctgtcaggctacatcagcaaagggggggcagaccgggccgttccagtgctgatcattggcattctggtgttcctacccggattttaccacctgcgcatcgcttactatgcatccaaaggctaccgtggttactcctatgatgacattccagactttgatgactagcacccaccccatagctgaggaggagtcacagtggaactgtcccagctttaagatatctagcagaaactatagctgaggactaaggaattctgcagcttgcagatgtttaagaaaataatggccagattttttgggtccttcccaaagatgttaagtgaacctacagttagctaattaggacaagctctatttttcatccctgggccctgacaagtttttccacaggaatatgtatcatggaagaatagaggttattctgtaatggaaaagtgttgcctgccaccaccctctgtagagctgagcatttcttttaaatagtcttcattgccaatttgttcttgtagcaaatggaacaatgtggtatggctaatttcttattattaagtaatttattttaaaaatatctgagtatattatcctgtacacttatccctaccttcatgttccagtggaagaccttagtaaaatcaaagatcagtgagttcatctgtaatattttttttacttgctttcttactgacagcaaccaggaatttttttatcctgcagagcaagttttcaaaatgtaaatacttcctctgtttaacagtccttggaccattctgatccagttcaccagtaggttggacagcatataatttgcatcattttgtcccttgtaaatcaagatgttctgcagattattcctttaacggccggacttttggctgtttcctaatgaaacatgtagtggttattatttagagtttatagccgtattgctagcaccttgtagtatgtcatcattctgctcatgattccaaggatcagcctggatgcctagaggactagatcaccttagtttgattctattttttagcttgcaaaaagtgacttatattccaaagaaattaaaatgttgaaatccaaatcctagaaataaaatgagttaacttcaaacaaaaaaaaaaaaaaa

SEQ ID NO: 27 - DNA, 894 bp, Homo Sapiens
  CDS 61..690
  sig_peptide 61..168: Von Heijne matrix score 4.60 seq GTVVLVAGTLCFA/WW
  polyA_signal 858..863
  polyA_site 879..894
acaccttcacctgcgcccagctccctgcgcgcctggacagcgcctgctgcccgcctcccgatggccctgccccagatgtgtgacgggagccacttggcctccaccctccgctattgcatgacagtcagcggcacagtggttctggtggccgggacgctctgcttcgcttggtggagcgaaggggatgcaaccgcccagcctggccagctggccccacccacggagtatccggtgcctgagggccccagccccctgctcaggtccgtcagcttcgtctgctgcggtgcaggtggcctgctgctgctcattggcctgctgtggtccgtcaaggccagcatcccagggccacctcgatgggacccctatcacctctccagagacctgtactacctcactgtggagtcctcagagaaggagagctgcaggacccccaaagtggttgacatccccacttacgaggaagccgtgagcttcccagtggccgaggggcccccaacaccacctgcataccctacggaggaagccctggagccaagtggatcgagggatgccctgctcagcacccagcccgcctggcctccacccagctatgagagcatcagccttgctcttgatgccgtttctgcagagacgacaccgagtgccacacgctcctgctcaggcctggttcagactgcacggggaggaagttaaaggctcctagcaggtcctgaatccagagacaaaaatgctgtgccttctccagagtcttatgcagtgcctgggacacagtaggcactcagcaaacgttcgttgttgaaggctgttctatttatctattgctgtataacaaaccaccccagaatttagtggcttaaaataaatcccattttattacgaaaaaaaaaaaaaaaa

SEQ ID NO: 28 - DNA, 1447 bp, Homo Sapiens
  CDS 501..1253
  sig_peptide 501..1229: Von Heijne matrix score 4.10 seq LPSLAHLLPALDC/LE
  polyA_signal 1392..1397
  polyA_site 1432..1447
  misc_feature 243,252,278,285,387,1429: n=a, g, c or t
gtgagtcaggtgggtcctgggcccaggaaccggcccggagccgtggacgccctacagctgagaaggggacccaaggggtcggccgcggccaaggcccctaggaccgccgccccagctcacgctgccgacggcagctatagacattctgcgtcaggtccgggctcctggactttgcctttcccgagccctggaggtggggagaaaaggttcaccaatttttaaaatccaaatatatctcatggntacagtggnaagaactggccagagagtctggaagntttgggnttctggtcctggctgtgccactgactcactgtgaccttgggatcttgtgctgtgaagacatttcccaagtgcttcatgttagccagcaaatctgacccacanggcctggaaagaggtgattgttaggttgcgcagaggtggtcttatccagctcagcttcccctgggacccaccgtgggacctgaggcagaactggggtggacttggcctcctccatggcacaccggctgcagatacgactgctgacgtgggatgtgaaggacacgctgctcaggctccgccaccccttaggggaggcctatgccaccaaggcccgggcccatgggctggaggtggagccctcagccctggaacaaggcttcaggcaggcatacagggctcagagccacagcttccccaactacggcctgagccacggcctaacctcccgccagtggtggctggatgtggtcctgcagaccttccacctggcgggtgtccaggatgctcaggctgtagcccccatcgctgaacagctttataaagacttcagccacccctgcacctggcaggtgttggatggggctgaggacaccctgagggagtgccgcacacggggtctgagactggcagtgatctccaactttgaccgacggctagagggcatcctggagggccttggcctgcgtgaacacttcgactttgtgctgacctccgaggctgctggctggcccaagccggacccccgcattttccaggaggccttgcggcttgctcatatggaaccagtagtggcagcccatgttggggataattacctctgcgattaccaggggcctcgggctgtgggcatgcacagcttcctggtggttggcccacaggcactggaccccgtggtcagggattctgtacctaaagaacacatcctcccctctctggcccatctcctgcctgcccttgactgcctagagggctcaactccagggctttgaggccagtgagggaagtggctgggccctaggccatggagaaaaccttaaacaaaccctggagacagggagccccttctttctccacagctctggacctttccccctctccctgcggcctttgtcacctactgtgataataaagcagtgagtgctgagctctcacccttcccccnccaaaaaaaaaaaaaaaa

SEQ ID NO: 29 - DNA, 1540 bp, Homo Sapiens
  CDS 25..402
  sig_peptide 25..96: Von Heijne matrix score 7.00 seq LLCCFRALSGSLS/MR
  polyA_signal 1500..1505
  polyA_site 1525..1540
  misc_feature 625,1411,1432,1440,1450,1506: n=a, g, c or t
agcctggccctccctctttccaaaatggacaagtccctcttgctggaactccccatcctgctctgctgctttagggcattatctggatcactttcaatgagaaatgatgcagtcaatgaaatagttgctgtgaaaaacaattttcctgtgatagaaattattcagtgtaggatgtgccacctccagttcccaggagaaaagtgctccagaggaagaggaatatgcacagcaacaacagaagaggcctgcatggttggaaggatgttcaaaagggatggtaatccctggttaaccttcatgggctgcctaaagaactgtgctgatgtgaaaggcataaggtggagtgtctatttggtgaacttcaggtgctgcaggagccatgacctgtgcaatgaagacctttagaagttaatggttcttctgtgactccaatttctgggtgaggttgttgcctcagcctcttcacaatgactttctaaaaaaaatcacacacacacacacacacactacagaagaggattgcaaacacatggctccatcttctgcacacgaaaggaaagtccctctccttttctacagtctctgtcacgccccttaaaataagtaaataaataaccttgagagnaaagaacaagatcaatatatcctgcaggttgctacaaacccttgtgctttcactgtatagccagttcattcagaaaaggaggaaagggtagtttaatttcaaaaaagaatcccttcctctttcctctgctgctttccttccttctgtggcagggtattttaatatatttttcaaatttttttcctttctgtgttatccttcttatcccactccaaagaaagcacataactgtggcctgaagggatggggagtagcaacataaaaagaagtggctcaagtcttcttggagtttgttcatgaatgctgatcccagggtgaggagaagattgggacatagaaaggaaactgcatcagaaacatgaacagagaaagattgtctaccttctagaatcagatctgtttggggctgggggttggagaataaaagcaggagaagtctatgggattctagaaatagtacctgcatccagcttccctgccaaactcacaaggagacatcaacctctagacagggaacagcttcaggatacttccaggagacagagccaccagcagcaaaacaaatattcccatgcctggagcatggcatagaggaagctgagaaatgtggggtctgaggaagccatttgagtctggccactagacatctcatcagccacttgtgtgaagagatgccccatgaccccagatgcctctcccacccttacctccatctcacacacttgagcttgccactctgtataattctaacatcctggagaaaaatggcagtttgaccgaacctgnttcacaagggtagaggctganttctaacngaaacttgtnagaatgaagcctggaaagagtgatgaattatattatattatataaaaataataatnaaaaatataaagaaagctaaaaaaaaaaaaaaaa

SEQ ID NO: 30 - DNA, 1643 bp, Homo Sapiens
  CDS 280..678
  sig_peptide 280..411: Von Heijne matrix score 3.90 seq LSDSLWSPHCSWS/ER
  polyA_signal 1606..1611
  polyA_site 1628..1643
cctaagttttctcaaaaatgtctttttacagttagtttaagtcaggatctaaacaaagttcatacattacatttgcttgatgtctctcaactgtcttataacctataacaattgctcccaatccatttttcatgccattactttatttaaaaacctgggccaacccagttctcaaaaggtattggacatcctcagaaaagatgactgctctatgttgaaccaaacaactgattcttacaggtttcttcctcacttgtcctctggctgtggcagccagatatggacaggagagctacatccttccctccactccctgccaaagaaaggagagctgggataagcagtgccctcccctgcccacccactatgtcactttctgactccctttggtcccctcattgctcttggagtgagagacctcattccttctctcactggaggcagccaagaatgggatcctctggtgggtctttggattatgtaagtttcaaacactggatacacagctccagatctaaaggcaagattgctgctctagaggcaggactgttcatttcctgccttggggatgcacccagaggcctgaatgcttcccaaggaaaccaaagaaagaacatggtctgtttcagaggtggagtggccagtctagctctgccatctctcactccttcctgcctttagggtaccactgaggtggaaagcctgaactgctgtctctgctctggcttgtgctcaagctgtgtgtccttggactggccatctcctctctgcaaccctcggtcttctcatttgtaaaatggaagtgatcctctctgcccatacttccttacagggctgcttggagacaatcaatcaagatgagggaaattgagattctacaaagagtgtgatgcctacataacaaagtattgtttttctcacagttggtggtatttgaggagaaggtgaagattttggttggaagagggaccagcagacaaacttgttctcttgtgtataaaaagccataacacgccccacatccctcaagctaggaagaaacctgggctggatggtgacccactggagaagctgtgacatcctagcatggggaagagtaccaggatgcccactcctcttccccaggaaccaccaaggagcctggagcctggctttatctcagccctgagtccccctctcccggtgcgcacacccctaacttttttttttttagatggaatcttgctctgtcgcccaggctggagtgcaacggcagctcactgtaacctccacctcccaggttcaagcgattctcctgcctcagcctcccgagtagctgggattacaggcgcgtgactccatgcctggctaatttttgtatttttagtagaggtagggtttcaccatgttgaccagggtggtctggaactcctgatctcaggtgatctgcctgcctccacctcccaaagtgctggaattacaggtgtgagctaccgcgcccggccaatctggggctcctagctttggtgcaccaactactcaaatccccaacttctctccaagaggaatttcaagaaacactgaccaatctggttacagaagctgaaggggccccaaccaggctgcaataaacctgctttacccttccaaaaaaaaaaaaaaaa

SEQ ID NO: 31 - DNA, 1314 bp, Homo Sapiens
  CDS 64..726
  sig_peptide 64..147: Von Heijne matrix score 3.70 seq VVFTLGMFSAGLS/DL
  polyA_signal 1279..1284
  polyA_site 1300..1314
agtaggtcccggcaaccgcaggctcgcggcgggcgctgggcgcgggatccgactctagtcgtaatggaggcgggcggctttctggactcgctcatttacggagcatgcgtggtcttcacccttggcatgttctccgccggcctctcggacctcaggcacatgcgaatgacccggagtgtggacaacgtccagttcctgccctttctcaccacggaagtcaacaacctgggctggctgagttatggggctttgaagggagacgggatcctcatcgtcgtcaacacagtgggtgctgcgcttcagaccctgtatatcttggcatatctgcattactgccctcggaagcgtgttgtgctcctacagactgcaaccctgctaggggtccttctcctgggttatggctacttttggctcctggtacccaaccctgaggcccggcttcagcagttgggcctcttctgcagtgtcttcaccatcagcatgtacctctcaccactggctgacttggctaaggtgattcaaactaaatcaacccaatgtctctcctacccactcaccattgctacccttctcacctctgcctcctggtgcctctatgggtttcgactcagagatccctatatcatggtgtccaactttccaggaatcgtcaccagctttatccgcttctggcttttctggaagtacccccaggagcaagacaggaactactggctcctgcaaacctgaggctgctcatctgaccactgggcaccttagtgccaacctgaaccaaagagacctccttgtttcagctgggcctgctgtccagcttcccaggtgcagtgggttgtgggaacaagagatgactttgaggataaaaggaccaaagaaaaagctttacttagatgattgattggggcctaggagatgaaatcactttttattttttagagattttttttttttaattttggaggttggggtgcaatctttagaatatgccttaaaaggccgggcgcggtggctcacgcctgtaatcccagcactttgggaggccaaggtgggcggatcgcctgaggtcaggagttcaagaccaacctgactaacatggtgaaaccccatctctactaaaaatacaaaattagccaggcatgatggcacatgcctgtaatcccagatacttgggaggctgaggcaggagaattgcttgaacccaggaggtggaggttgcagtgagctgagatcgtgccattgtgatatgaatatgccttatatgctgatatgaatatgccttaaaataaagtgttccccacccctaaaaaaaaaaaaaaa

SEQ ID NO: 32 - DNA, 2356 bp, Homo Sapiens
  CDS 42..1097
  sig_peptide 42..110: Von Heijne matrix score 4.40 seq QFILLGTTSVVTA/AL
  polyA_signal 2323..2328
  polyA_site 2341..2356
atccttggcgccacagtcggccaccggggctcgccgccgtcatggagagcggagggcggccctcgctgtgccagttcatcctcctgggcaccacctctgtggtcaccgccgccctgtactccgtgtaccggcagaaggcccgggtctcccaagagctcaagggagctaaaaaagttcatttgggtgaagatttaaagagtattctttcagaagctccaggaaaatgcgtgccttatgctgttatagaaggagctgtgcggtctgttaaagaaacgcttaacagccagtttgtggaaaactgcaagggggtaattcagcggctgacacttcaggagcacaagatggtgtggaatcgaaccacccacctttggaatgattgctcaaagatcattcatcagaggaccaacacagtgccctttgacctggtgccccacgaggatggcgtggatgtggctgtgcgagtgctgaagcccctggactcagtggatctgggtctagagactgtgtatgagaagttccacccctcgattcagtccttcaccgatgtcatcggccactacatcagcggtgagcggcccaaaggcatccaagagaccgaggagatgctgaaggtgggggccaccctcacaggggttggcgaactggtcctggacaacaactctgtccgcctgcagccgcccaaacaaggcatgcagtactatctaagcagccaggacttcgacagcctgctgcagaggcaggagtcgagcgtcaggctctggaaggtgctggcgctggtttttggctttgccacatgtgccaccctcttcttcattctccggaagcagtatctgcagcggcaggagcgcctgcgcctcaagcagatgcaggaggagttccaggagcatgaggcccagctgctgagccgagccaagcctgaggacagggagagtctgaagagcgcctgtgtagtgtgtctgagcagcttcaagtcctgcgtctttctggagtgtgggcacgtttgttcctgcaccgagtgctaccgcgccttgccagagcccaagaagtgccctatctgcagacaggcgatcacccgggtgatacccctgtacaacagctaatagtttggaagccgcacagcttgacctggaagcacccctgcccccttttcagggatttttatctcgaggcctttggaggagcagtggtgggggtagctgtcacctccaggtatgattgagggaggaattgggtagaaactctccagacccatgcctccaatggcaggatgctgcctttcccacctgagaggggaccctgtccatgtgcagcctcatcagagcctcaccctgggaggatgccgtggcgtctcctcccaggagccagatcagtgcgagtgtgactgaaaatgcctcatcacttaagcaccaaagccagtgatcagcagctcttctgttcctgtgtcttctgtttttttctggtgaatcgttgcttgctgtggacttggtggaggactcagaggggaggaaaggctgggccccgagtacaacggatgccttgggtgctgcctccgaagagactctgccgcagcttttcttctttttcctcatgccccgggaaacagtctttcttcagaattgtcaggctgggcaggtcaacttgtgttcctttcccctcacctgcttgcctccttaacgcctgcacgtgtgtgtagaggacaaaagaaagtgaagtcagcacatccgcttctgcccagatggtcggggccccgggcaacagattgaagagagatcatgtgaagggcagttggtcaggcaggcctcctggtttcgccactggccctgatttgaactcctgccacttgggagagctcggggtggtccctggttttccctcctggagaatgaggcgcagaggcctcgcctcctgaaggacgcagtgtggatgccactggcctagtgtcctggcctcacagcttccttgcaaggctgtcacaaggaaaagcagccggctggcaccctgagcatatgccctcttggggctccctcatccagcccgtcgcagctttgacatcttggtgtactcatgtcgcttctccttgtgttaccccctcccagtattaccatttgcccctcacctgcccttggtgagccttttagtgcaagacagatggggctgttttcccccacctctgagtagttggaggtcacatacacagctctttttttattgcccttttctgcctctgaatgttcatctctcgtcctcctttgtgcaggcgaggaaggggtgccctcaggggccgacactagtatgatgcagtgtccagtgtgaacagcagaaattaaacatgttgcaaccaaaaaaaaaaaaaaaa

SEQ ID NO: 33 - DNA, 1701 bp, Homo Sapiens
  CDS 245..1399
  sig_peptide 245..796: Von Heijne matrix score 5.10 seq GWLPLLLLSLLVA/TW
  polyA_signal 1669..1674
  polyA_site 1687..1701
atcccgcgcagtggcccggcgatgtcgctcgtgctgctaagcctggccgcgctgtgcaggagcgccgtaccccgagagccgaccgttcaatgtggctctgaaactgggccatctccagagtggatgctacaacatgatctaatcccgggagacttgagggacctccgagtagaacctgttacaactagtgttgcaacaggggactattcaattttgatgaatgtaagctgggtactccgggcagatgtggacattttcctacatcggcttccctgtagagctgaacacagtctatttcattggggcccataaaattcctaatgcaaatatgaatgaagatggcccttccatgtctgtgaatttcacctcaccaggctgcctagaccacataatgaaatataaaaaaaagtgtgtcaaggccggaagcctgtgggatccgaacatcactgcttgtaagaagaatgaggagacagtagaagtgaacttcacaaccactcccctgggaaacagatacatggctcttatccaacacagcactatcatcgggttttctcaggtgtttgagccacaccagaagaaacaaacgcgagcttcagtggtgattccagtgactggggatagtgaaggtgctacggtgcagctgactccatattttcctacttgtggcagcgactgcatccgacataaaggaacagttgtgctctgcccacaaacaggcgtccctttccctctggataacaacaaaagcaagccgggaggctggctgcctctcctcctgctgtctctgctggtggccacatgggtgctggtggcagggatctatctaatgtggaggcacgaaaggatcaagaagacttccttttctaccaccacactactgccccccattaaggttcttgtggtttacccatctgaaatatgtttccatcacacaatttgttacttcactgaatttcttcaaaaccattgcagaagtgaggtcatccttgaaaagtggcagaaaaagaaaatagcagagatgggtccagtgcagtggcttgccactcaaaagaaggcagcagacaaagtcgtcttccttctttccaatgacgtcaacagtgtgtgcgatggtacctgtggcaagagcgagggcagtcccagtgagaactctcaagacctcttcccccttgcctttaaccttttctgcagtgatctaagaagccagattcatctgcacaaatacgtggtggtctactttagagagattgatacaaaagacgattacaatgctctcagtgtctgccccaagtaccacctcatgaaggatgccactgctttctgtgcagaacttctccatgtcaagcagcaggtgtcagcaggaaaaagatcacaagcctgccacgatggctgctgctccttgtagcccacccatgagaagcaagagaccttaaaggcttcctatcccaccaattacagggaaaaaacgtgtgatgatcctgaagcttactatgcagcctacaaacagccttagtaattaaaacattttataccaataaaattttcaaatattgctaactaatgtagcattaactaacgattggaaactacatttacaacttcaaagctgttttatacatagaaatcaattacagttttaattgaaaactataaccattttgataatgcaacaataaagcatcttcagccaaaaaaaaaaaaaaa

SEQ ID NO: 34 - DNA, 772 bp, Homo Sapiens
  CDS 235..441
  sig_peptide 235..303: Von Heijne matrix score 5.30 seq LLLDVTVFIPALP/FS
  polyA_site 758..772
  misc_feature 573: n=a, g, c or t
aatacctggcaatctgtttaagatcattgacaggcctgagagttttccatacggcctgcaccctaacctctgggaagaaaatatccacaatgaaatttctacaagattagaggaaggagagaggcaacggggattccatttctactaggagtatcaacctctgagagggatatatccatctctgtggatgtcatctgctctgcagaaaaccctttcttggaactaccaggaaacatgaatctgatgtggaccctcctccttttcctccttttggacgtaactgtcttcattccagccctgcccttctcaacacgacatatagacaaccccaggtcgtgggtccctagaggacaccaccgatactgtgatgtgatgatgaggcgccgttggctgatctataggggtaaatgcgagcagatccacacattcattcatagaatctgaccaccatagcagatttctgcagaactccaccactgccctgtaccaacagcccctccatgtgcagctgccacaacagtactcatgatgtcaatgtcactgactgctttgccagcacagggacccgacctnttcactgccactaccaaaaataaggagtccaccaggcccatgcgagtgggctgcaagaagggggcatctgttcacctggatggctaggttcctcctgacaacggcacctgaatgacttgcaccctacgccttcaaatctgtgcagcactgtcaaggtcttctttgtaaatgcttcgtcctttgcaaaaaaaaaaaaaaa

SEQ ID NO: 35 - DNA, 987 bp, Homo Sapiens
  CDS 88..411
  sig_peptide 88..234: Von Heijne matrix score 4.70 seq LLLVSTWSADLMS/YR
  polyA_signal 938..943
  polyA_site 964..987
  misc_feature 828,832: n=a, g, c or t
ttttttctttgacatgttcagatgttggcaaggctgaaaactgcaggggatctggttgtgataatccaggcctgaatatatacaaatatgaacaagacccacaaggactgctcatcaccccagtattccatttacaacatcctgaatgaactcccgaccaggcctataattctctcttgcagccaaatatcctgcttactcctggtatctacctggtcagcagacctcatgagttatcgcccagtgacaaaaccatcccaaagatgcaccagtccagcacaaagtatgactgtcaatctcacaaaagatgtagggttctacgaggatactcagagtataagaattacgctaagtgaaataagccaagcccagaaagacacatactttattatttcatgtatctgtggaatctaaaagagtcaaattcatggcagcagggagagggctgaagaagggggagatgttgatcaaagtttctatgtatacaaagaccaaaccatcacattatgcctcataaatatatacaattattatttgctaattacaagtaaagcaatacaagaagaaaaaaaggaatcataagtaaatccatgacaagtgaaaacgcaatggagagaagggaatcaatgattgaagaagagaaaggacagtggatttacaactgcttcgaaagagtgatttgactggcaaaggactggggagaggtcctttgggaaatggacaaaaccctcgaatggttaggaaagacaatctctttataaatgcggggcataagctgagcacaaggtgaagtttggcatgtactgccgtgggatgttgtaaaaattnatgntcaaaagcaaagcaattcttggttcatctgtgttcactgtgagactagcctattattggggttaaacttataaacaaacttctgttcatcattttttttctccaaaataaagtgatcaaattgtcccacagaaaaaaaaaaaaaaaaaaaaaaaa

SEQ ID NO: 36 - DNA, 1324 bp, Homo Sapiens
  CDS 129..452
  sig_peptide 129..212: Von Heijne matrix score 5.20 seq LDIVISFVGAVSS/ST
  polyA_signal 1290..1295
  polyA_site 1309..1324
  misc_feature 888,1080: n=a, g, c or t
gatttttttcacaagcaatagtttagtagttcaactttcattaattatttctagtaattactttcagtattgaaaatacttactgttaatattcatgtaagtaacaaacatttaaataagaaaaataaatgtattttcattttctaggtgccggagcaattcttattcctcgtttagacattgtgatttccttcgttggagctgtgagcagcagcacattggccctaatcctgccacctttggttgaaattcttacattttcgaaggaacattataatatatggatggtcctgaaaaatatttctatagcattcactggagttgttggcttcttattaggtacatatataactgttgaagaaattatttatcctactcccaaagttgtagctggcactccacagagtccttttctaaatttgaattcaacatgcttaacatctggtttgaaatagtaaaagcagaatcatgagtcttctatttttgtcccatttctgaaaattatcaagataactagtaaaatacattgctatatacataaaaatggtaacaaactctgttttctttggcacgatattaatattttggaagtaatcataactctttaccagtagtggtaaacctatgaaaaatccttgcttttaagtgttagcaatagttcaaaaaattaagttctgaaaattgaaaaaattaaaatgtaaaaaaattaaagaataaaaatacttctattattcttttatctcagtaagaaataccttaaccaagatatctctcttttatgctactcttttgccactcacttgagaacagaataggatttcaacaataagagaataaaataagaacatgtataacaaaaagctctctccagatcatccctgtgaatgnccaaagtaaactttatgtacagtgtaaaaaaaaaaaaatctcagttatgtttttattagccaaattctaatgattggctcctggaagtatagaaaactcccattaacataatataagcatcagaaaattgcaaacactagaattaattttacactctaatggtagttgatcttcatagtcaagaggcactgntcaagatcatgacttagtgtttcaatgaaatttgacaagggactttaaaacttatccagtgcaactcccttgtttttcgtcagaggaaaaggaggcctagaaaggttaagtaacttggtcgagaccactcagccttgagatcaagaaaacctaatcttctgactcccaggccaggatgttttatttctcacatcatgtccaagaaaaagaataaattatgttcagctcaaaaaaaaaaaaaaaa

SEQ ID NO: 37 - DNA, 1918 bp, Homo Sapiens
  CDS 238..612
  sig_peptide 238..348: Von Heijne matrix score 9.40 seq LLCCVLSASQLSS/QD
  polyA_signal 1885..1890
  polyA_site 1905..1918
  misc_feature 945,1624: n=a, g, c or t
aaaaatctaagcgacttcgatgccaaggaagttgtgtaaatgtgcacgcgctacaccacacccagggtggaaaccacagttgcagagtcattaaacaatcaattgtttgtttaacatctgtgataggcagctttccttcttttcaacagtgatacctacgaaaatcaaaataaatgcaagctgaggttttgtgctcactgaaagggctgtcaaccccagaaggccgacacaaaaaaaatggtatgtgaagatgcaccgtcttttcaaatggcctgggagagtcaaatggcctgggagagggggcctgcccttctctgctgtgtcctttcggcttcccagttgagctcccaagaccaggacccactggggcatataaaatctctgctgtatcctttcggcttcccagttgagctcccaagaccaggacccactggggcatataaaaaagtcaaaaatcaaaatcaaacaacaagttctgagttacttaggaaacagacttcgcatttcaatcagagaggccacagagcaaggtctaaacttctggcttctagacaaattcctgatagaacatttaaatgtgggaagtggcttccccaggtcccatcccctgtttagggatagagttgatatcatttttatagttgccatgtatgcctctgcctgaatttttttaattgacttttgagcttttgagattgcacgagggagaacaaggcctttgctgttgtggataggaaagacttaacctaaaattaaaccagcaagaaagcattagtaaaaatctaacaatatgaagggctcttatgagtcatttttttcaaaagatgaaaactccagaaacgcacaggaacgaaatacctcccagaaacatgaagcaatcatcgaagactcactggtaatatttttaaaaagtatacagatcaaagcaaaaagaagccatgtgtnaacaaagagaaatgtgcaaatattttttaaggcagtattaagtgcaagaggagtaacatgaaataaacattctttcacatggctactgggaatataaatttcgctccagaaaggccgtagcagtttgacgataggtggcaaaaccttaagattgtgtactggggcccagaatttttatttctaggaatgtatcctgaggaaattatccgagatccccacaaactgcaatgtttaggaattgtccttatagcattgcatacacaagaaaaacagagaaaagcctgatccctgtcagtggaaaaggggttcaatgaattacggtgtgtctgcatgaggcttttatgacattaaaaattgttgaacaacggccaggcacagtggctcatgcctgtaatcctaacactttgggaggccaaggtgggaagattgcctgagctcaggagtttgagaccagcctgggcaacacggtgaaaccccgtctctactaaaatacaaaaaattagccgggcgtcgcagcatgcgcctgtagtcccagctgctcaggaggctgaggcaggagaattgattgaacccgggaggcagaggttgcactgagctgagattaagccaccgcactccagcctgggcgacagagcaagattccgttcccaagaaaaaaaaattgttcaacaataagggncaaagggagagaatcataacatctgattaaacagaaaaagcaagatttttaaaactaactatataaggatggtcccagctgtgtcaaaaggaagcttgtttgtaatacgtgtgcataaaaattaaatagaggtgaacacaattattttaaggcagttaaattatctctgtattgtgaactaagactttctagaattttacttattcattctgtacttaaattttttctaatgaacacatatacttttgtaatcagaaaatattaaatgcatgtatttttcaaaaaaaaaaaaaa

SEQ ID NO: 38 - DNA, 852 bp, Homo Sapiens
  CDS 229..735
  sig_peptide 229..492: Von Heijne matrix score 6.70 seq VFALSSFLNKASA/VY
  polyA_signal 816..821
  polyA_site 841..852
aatgactggcagtggcatcagcgatggcggctgcgtcggggtcggttctgcagcgctgtatcgtgtcgccggcagggaggcatagcgcctctctgatcttcctgcatggctcaggtgattctggacaaggattaagaatgtggatcaagcaggtttttaaatcaagatttaacattccaacacataaaaattatttatccaacagctcctcccagatcatatactcctatgaaaggaggaatctccaatgtatggtttgacagatttaaaataaccaatgactgcccagaacaccttgaatcaattgatgtcatgtgtcaagtgcttactgatttgattgatgaagaagtaaaaagtggcatcaagaagaacaggatattaataggaggattctctatgggaggatgcatggcaatgcatttagcatatagaaatcatcaagatgtggcaggagtatttgctctttctagttttctgaataaagcatctgctgtttaccaggctcttcagaagagtaatggtgtacttcctgaattatttcagtgtcatggtactgcagatgagttagttcttcattcttgggcagaagagacaaactcaatgttaaaatctctaggagtgaccacgaagtttcatagttttccaaatgtttaccatgagctaagcaaaactgagttagacatattgaagttatggattcttacaaagctgccaggagaaatggaaaaacaaaaatgaatgaatcaagagtgatttgttaatgtaagtgtaatgtctttgtgaaaagtgatttttactgccaaattataatgataattaaaatattaagaaatagcaaaaaaaaaaaaaaaa

SEQ ID NO: 39 - DNA, 726 bp, Homo Sapiens
  CDS 168..413
  sig_peptide 168..335: Von Heijne matrix score 3.80 seq QMIMLVCFNLSRG/CL
  polyA_signal 684..689
  polyA_site 708..726
  misc_feature 723: n=a, g, c or t
cagcaaaatggcagggaaggcagctctaagctcccatccttccataggaatgttgaataaacaaccagacactgtcagaaccaactttgtgagaaccgggaaaataatcaaaggtgtacggcaactaaaagaatgctggatcaacacaaaggaaacttaaaaatgatatgaaagctgtgtggcatttttgcttgtcccacaagtccagcttggtgatagtcttgaagacggcaggctggattccccaggctgggacccttatccctggttccagagaggagagcagatctgattcacaaatgattatgcttgtctgttttaatctttccagaggctgtctgaagaaggtattcatcatctctgttttacctgacccagaaaccattctgctaggaaaaacagtgggcattgcttgaaaacagtgttctgtggttgaaaaacccacagtcaccttgggctggtgggaatgtaaaatggcgcctcttctggatcatcgtttggcagtttctcaaaaggtcaaacgtagaatcactatttgatccaacaattctactcctaggtatatccccaaaagaattgaaaacaaggatgcaaacatatgcgtgtacactaatgtttatagaaaaaatattcacaataatcaaaaggcagaaacaacccaagtgtccaataacagaagaatgaataaacagtgtgatataaacataaaaaaaaaaaaaaaanaaa

SEQ ID NO: 40 - DNA, 1039 bp, Homo Sapiens
  CDS 100..852
  sig_peptide 100..159: Von Heijne matrix score 6.10 seq FLILFLFLMECQL/HL
  polyA_signal 998..1003
  polyA_site 1019..1039
agaacttcttgattcctcagataaatagaggacagatgctggactgtagctaagtatttcctttcatctacgggataaaatactgataatttgagagtgatggacaaggttcagagtggtttcctcattttgtttttgtttttaatggaatgccaacttcatttatgcttgccgtatgcagatggactccatcccactggaaacataacaggcttaccaggtagcttcaaccactggttttatgtgactcagggagaattgaaaagctgtttcaggggagataaaaagaaggtaattacatttcaccgcaaaaagttttcttttcaaggcagtaaacggtcacaaccacccagaaacatcaccaaagagcccaaagtgttctttcataaaacccagttgcctgggattcaaggggctgcctcgagatccacggctgcatcccctacgaaccccatgaaattcctgaggaataaagcaataattcggcatagacctgctcttgttaaagtaattttaatttcgagcgtagccttcagcattgccctgatatgtgggatggcaatctcctatatgatatatcgactggcacaggctgaggaaagacaacagctcgagtcactttataagaacctcaggataccgttattaggagatgaagaagagggctcagaggacgagggtgagtccacgcacctacttccaaagaacgaaaatgagctggaaaagttcatccactcagttattatatcaaaaagaagcaaaaatattaagaagaaactgaaggaagagcaaaactcagtaacagaaaacaaaacaaagaatgcgtcacataatggaaaaatggaagacttgtgaacgcagacgacagaggtgccggctgaggcagaggagaaactatgggggtgctgggagactgagcctgtgggcgtggcttgctcccagagaaccttatggaagaggacatcaaagaaagaaatgccagacctgtatcccagaaaataaagccacatgatatagcaaaaaaaaaaaaaaaaaaaaa

SEQ ID NO: 41 - DNA, 1355 bp, Homo Sapiens
  CDS 238..1152
  sig_peptide 238..339: Von Heijne matrix score 8.50 seq SIFLLLSFPDSNG/KA
  polyA_signal 1298..1303
  polyA_site 1324..1355
aattttcttgaaatcacatggtaccaatcacaagtcttgttattttgtttcattatgagaaagataatctactaaatattaaaatactggaaggagcaagatagctttgatccagggagaccttttccatttatgtgctttagtaatctgccgccaacaagctatcttctttatgttcttctacaactgatgttgttttgttttctcatgtttgtctcttaatagacaaatggaggcatgagcttccttagaattaccccttcgacgcatagttctgtttcatctggacttttgaggcttagtatctttctactacttagctttcctgactcaaacggaaaagccatttggacagctcacctgaatataacatttcaggttggaaatgagatcacatcggaattaggagagagtggagtgttcgggaatcattctcctctggaaagggtgtctggtgtggtggcacttcctgaagaatggaatcagaatgcctgtcatcctttgaccaatttcagcaggcccaaacaggcagactcatggctggccctcatcgaacgtggaggctgtacttttacacataaaatcaacgtggcagcagagaagggagcaaatggggtgatcatctacaactatcaaggtacgggcagtaaagtatttcccatgtctcaccaggggacggaaaatatagtcgcggtgatgataagcaacctgaaaggcatggaaattttgcactcgattcagaaaggagtctatgtgacagtcatcattgaagtggggagaatgcacatgcagtgggtgagccattacatcatgtatctatttaccttcctggctgccacaattgcctacttttacttagattgcgtctggagacttacacctagagtgcccaattctttcaccaggaggcgaagtcaaataaagacagatgtgaagaaagctattgaccagcttcaactgcgagttctcaaagaaggggatgaggaattagacctaaatgaagacaactgtgttgtttgctttgacacatacaaaccccaagatgtagtacgcattttaacttgcaaacattttttccataaggcatgcattgacccctggcttttagcccataggacatgtcccatgtgcaagtgtgacatcctgaaaacttaagaaatctggagaattttctgaagatgtaaccagatctttccaaatacaaagattagataaattgtcttattgtactttatgtagagagaaaatttcagcttctctacccaagtatgaacaagggtgaaatttgtgttttaaaaataaaactccttatcatgcccagctaaaaaaaaaaaaaaaaaaaaaaaaaaaaaaaa

SEQ ID NO: 42 - DNA, 572 bp, Homo Sapiens
  CDS 187..369
  sig_peptide 187..312: Von Heijne matrix score 7.10 seq LLPCSSVLTCGQA/SQ
  polyA_signal 489..494
  polyA_site 558..572
  misc_feature 94,527,537..538: n=a, g, c or t
cttcttcagtcagtggctggataatctaattataatgttataatccatcatttctctttttgaacagtcaatttagtttaacatttgcttaacnagccattatgtatgccaggtaatgtgctagatgctggtggttcaaagaaaggaacgatgtggacctgacctcaaagaaatccattggagaatatgacagatttagatttaatgatcaactttacttttcctatacagtgggtcaaccaaaaccgcatggcgtactactctctgaagcctctactaccctgctcctccgtgttgacatgtggtcaggcaagccaggacttactcacatcagctacatcagttactgggatggagaaaattgaagcctagaaagatcaagaaactttctccaggccataaatagaggaatcaggattcaaatcagatagaccccagggcttgttctcttcaacaccacattaccctacattattattcaattattaaataaaaccttgcattagtggcatttccaaatgcataancaaaaaaatnnaaaaaaaagtaacactggcaaaaaaaaaaaaaaa

SEQ ID NO: 43 - DNA, 535 bp, Homo Sapiens
  CDS 121..459
  sig_peptide 121..165: Von Heijne matrix score 4.20 seq FYLLLASSILCAL/IV
  polyA_signal 497..502
  polyA_site 521..535
  misc_feature 486,489: n=a, g, c or t
agttacaccaggcatcctggcccaaagtttcccaaatccaggcggctagaggcccactgcttcccaactaccagctgagggggtccgtcccgagaagggagaagaggccgaagaggaaacatgaacttctatttactcctagcgagcagcattctgtgtgccttgattgtcttctggaaatatcgccgctttcagagaaacactggcgaaatgtcatcaaattcaactgctcttgcactagtgagaccctcttcttctgggttaattaacagcaatacagacaacaatcttgcagtctacgacctctctcgggatattttaaataatttcccacactcaatagccaggcagaagcgaatattggtaaacctcagtatggtggaaaacaagctggttgaactggaacatactctacttagcaagggtttcagaggtgcatcacctcaccggaaatccacctaaaagcgtacaggatgtaatgccagnggnggaaatcattaaagacactttgagtagattcaaaaaaaaaaaaaaa

SEQ ID NO: 44 - DNA, 572 bp, Homo Sapiens
  CDS 34..336
  sig_peptide 34..123: Von Heijne matrix score 7.80 seq SVTLAQLLQLVQQ/GQ
  polyA_signal 536..541
  polyA_site 556..572
  misc_feature 545: n=a, g, c or t
gcattacacgccggtcaggattcgcgacccgacatggagcgtccccgcagtccccaatgctcggccccggcctctgcctcagcttcggttaccctggcgcagctcctgcagctggtccagcagggccaggaactcccgggcctggagaaacgccacatcgcggcgatccacggcgaacccacagcgtcccggctgccgcggaggcccaagccctgggaggccgcggctttggctgagtcccttccccctccgaccctcaggataggaacggccccggcggagcctggcttggttgaggcagcgactgcgccttcttcatggcatacagtgggcccctgaggttccaggtcctttgcggcggcgatctggagggcgtggctacaggacccgggatgccattcagttactcatcttttatgctttcgtcctgacctgtctcaactagacttgctcctgcaaccaccatgggggttttgcatttacatttgtggaccatgttacagttaagaaaaatcctgtttcagtccttatatgtaataaaatgntttatgatgcaaaaaaaaaaaaaaaaa

SEQ ID NO: 45 - DNA, 804 bp, Homo Sapiens
  CDS 119..409
  sig_peptide 119..388: Von Heijne matrix score 4.30 seq TCLTACWTALCCC/CL
  polyA_signal 769..774
  polyA_site 789..804
  misc_feature 274: n=a, g, c or t
  unsure -39: Xaa = His,Gln
acttgctctgagacaggtgcggcaagtctactgcgggctggtccgggctcctcaggttcagacccgaccgttatccagtcggttcgtggagaggagaggtgcactttacaggtccccaatgaaccaagagaaccctccaccatatccaggccctggtccaacggccccatacccaccttatccaccacaaccaatgggtccaggacctatggggggaccctacccacctcctcaagggtacccctaccaaggatacctacagtacggctggcanggtggacctcaggagcctcctaaaaccacagtgtatgtggtagaagaccaaagaagagatgagctaggaccatccacctgcctcacagcctgctggacggctctctgttgctgctgtctctgggacatgctcacctgaccagaccagcccagccgtcctgtcctgccagctctgctgccacctctgacaggtgtgcctgcccccatctcttctgattgctgttaacaaatgactagctttgcacagacacctctaccttcagcactatgggattctagattaatgggggttgctactgtttaattcagtgacttgatctttttaatgtccaaaatccatttcttattgatctttaaagatgtgctaaatgacttttttggccaaaggcttagttgtgaaaaatataatttttaaattatacattcaaggtagtggccaaatgtaacacatcaatcatggaatgatttctctgctaacagccgcctgtatgtttcaataaatttgtccaaagctcaaaaaaaaaaaaaaaa

SEQ ID NO: 46 - DNA, 629 bp, Homo Sapiens
  CDS 232..534
  sig_peptide 232..306: Von Heijne matrix score 3.70 seq AKTCLVLCSRVLS/VI
  polyA_signal 595..600
  polyA_site 615..629
tatcactgttacgaaccaaggatttacagatcactggcaaaaattctgagaactttcacaccagtatactgtccaagcccattaagtggcatcacacctctcttttatgtagctcagacaagacagtctaatatcttcaaaatactactgcaatatggaatcttagaaagagaaaaaaaccctatcaacattgtcttaacaatagtactctacccttcgagagtaagagtaatggttgatcgtgaattggctgacatccatgaagatgccaaaacatgtttggtactatgttccagagtgctttctgtcatttcagtcaaggaaataaagacacagctgagtttaggaagacatccaattatttcaaattggtttgattacattccttcaacaagatacaaagatccatgtgaactattacatctttgcagactaaccatcaggaatcaactattaaccaacaatatgctcccagatggaatattttcacttctaattcctgctcgtctacaaaactatctgaatttagaaatctaacatacgtcagtgtcctaagttccttaacaatgcttaccaatgtatggcttagaagttaataaaaattcacttcatgcaaaaaaaaaaaaaaa

SEQ ID NO: 47 - DNA, 669 bp, Homo Sapiens
  CDS 140..595
  sig_peptide 140..442: Von Heijne matrix score 4.10 seq VFMLIVSVLALIP/ET
  polyA_signal 630..635
  polyA_site 655..669
gagcgggaagccgagctgggcgagaagtaggggagggcggtgctccgccgcggtggcggttgctatcgcttcgcagaacctactcaggcagccagctgagaagagttgagggattgctgctgctgggtctgcagacgcgatggataacgtgcagccgaaaataaaacatcgccccttctgcttcagtgtgaaaggccacgtgaagatgctgcggctggcactaactgtgacatctatgaccttttttatcatcgcacaagcccctgaaccatatattgttatcactggatttgaagtcaccgttatcttatttttcatacttttatatgtactcagacttgatcgattaatgaagtggttattttggcctttgcttgatattatcaactcactggtaacaacagtattcatgctcatcgtatctgtgttggcactgataccagaaaccacaacattgacagttggtggaggggtgtttgcacttgtgacagcagtatgctgtcttgccgacggggcccttatttaccggaagcttctgttcaatcccagcggtccttaccagaaaaagcctgtgcatgaaaaaaaagaagttttgtaattttatattactttttagtttgatactaagtattaaacatatttctgtattcttccaaaaaaaaaaaaaaa

SEQ ID NO: 48 - DNA, 973 bp, Homo Sapiens
  CDS 32..658
  sig_peptide 32..289: Von Heijne matrix score 4.00 seq KLWKLLFLMKSQG/WI
  polyA_signal 936..941
  polyA_site 959..973
  misc_feature 934: n=a, g, c or t
agggagagggatggctagtgaggtttagatcatgttgagccctacctttgttttgtgggatgttggatatcccttatacacctatggatccatctgcattattgcattaattatttggcaagtgaaaaagagctgccaaaaattaagcttggtacctaacaggagctgttgccggtgtcaccgaagagtccaacaaaagtctggagatagaacatcaagagctaggagaacttcacaggaagaagccgagaagttgtggaagctgctgtttctcatgaaaagccagggctggattcctcaggaaggaagtgtgcggcgaatcctgtgtgcagacccctgctgccaaatctgcaatgttatggctctggagattaagcaattgctggcagaagctccagaagttggcttggataacaagatgaagctgtttctgcactggattaaccctgaaatgaaagatcgaaggcatgaggaatccattctcctttctaaggctgagacagtgacccaagacaggacaaaaaacattgagaagagtccaactgtcaccaaagatcatgtgtggggagctacaacacagaagacaacagaggaccctgaggctcagcctccttctactgaggaggaaggcctgatcttctgtgatgcccccagtgcctaaataatctgctctagcaacactcccttcagtccagccaatcctgggtcctgtgccactcctacaaatgctccaaactctgtcctcaaatgacttgtgccactcaaccaggaaatctatcccaggtctaactcacctcagcagaaggcactgttttatgcaagaatacccatcacaagaaaaaggagttcataggttcctgaacctctgcaatcccctgaaaaaggctttcattgccatttccattaacatgcaggtgaagcagggcattctccnaaatatactttgtacctttaagctaaaaaaaaaaaaaaa

SEQ ID NO: 49 - DNA, 791 bp, Homo Sapiens
  CDS 14..280
  sig_peptide 14..76: Von Heijne matrix score 9.50 seq ALVVLCAFQLVAA/LE
  polyA_site 776..791
  misc_feature 607: n=a, g, c or t
ataggcgcgcaccatgggctcctgctccggccgctgcgcgctcgtcgtcctctgcgcttttcagctggtcgccgccctggagaggcaggtgtttgacttcctgggctaccagtgggcgcccatcctggccaactttgtccacatcatcatcgtcatcctgggactcttcggcaccatccagtaccggctgcgctatgtcatgtgtacacgctgtgggcagccgtctgggtcacctggaacgtcttcatcatctgcttctacctggaagtcggtggcctcttaaaggacagcgagctactgaccttcagcctctcccggcatcgctcctggtggcgtgagcgctggccaggctgtctgcatgaggaggtgccagcagtgggcctcggggccccccatggccaggccctggtgtcaggtgctggctgtgccatggagcccagctatgtggaggccctacacagttgcctgcagatcctgatcgcgcttctgggctttgtctgtggctgccaggtggtcagcgtgtttacggaggaagaggacagctgcctgcgtaagtgaggaaacagctgatcctgctcctgtggcctccagcctcagcgaccgaccnagtgacaatgacaggagctcccaggccttgggacgcgcccccacccagcaccccccaggcggccggcagcacctgccctgggttctaagtactggacaccagccagggcggcagggcagtgccacggctggctgcagcgtcaagagagtttgtaatttcctttctcttaaaaaaaaaaaaaaaa

SEQ ID NO: 50 - DNA, 1110 bp, Homo Sapiens
  CDS 93..290
  sig_peptide 93..149: Von Heijne matrix score 9.30 seq VFVFLFLWDPVLA/GI
  polyA_signal 1078..1083
  polyA_site 1096..1110
agtataggactgtgtgctcaacctcttctctctgttccctgacagccgatgtcagaccctgccactagcctccttaacagaagttcccagccatgaagcctctccttgttgtgtttgtctttcttttcctttgggatccagtgctggcaggtataaattcattatcatcagaaatgcacaagaaatgctataaaaatggcatctgcagacttgaatgctatgagagtgaaatgttagttgcctactgtatgtttcagctggagtgctgtgtcaaaggaaatcctgcaccctgacataagaaaccaatgaatggccactatcctgtaggcccttgattctgccatctttcacaaaaccagggaatttagatcaaactgtgacaccatgatgtgtccatgactactggtttttagcatttttataggccagcagactcttgtggtcttaaatttaaagagctgagctgtagccttctttaaaagagctcggtttttcacaaaaacaatgtagaagatattttctcacctcaacgtgatgtccagtgtgctcatcagcacctgtttctccctctaatcatagaggatattcttattatttagaaaggcttcaagggaaacaacttttgacacctaagtcgtgtcctaccttcgcttcagcttcgcatttcccatttctgtgaaattcccaacagagaagcagatttgccatggccttctgacaaccttgtacatctctcacataaaccgcataggcagggcttgactacaggctggcccgagtctgcactgagtctgaccctgaagttcctttggaacaggagaggccatcttgtgatgggctggaacaaggtaatttctcatccacctccctagtttcagttgagcaatggaacttcccacctgagcccctagggttcagctacaggctataagactgccgtcctgtggtttagtgttggttccttagcagcagagtgatgccacctctgctgcccgtcatctgactcctctggatgggtgttatcctgtggcttaagagctaacaccatgctgatcttgctttgctatatgtgtaactaataaactgcctaaatccaaaaaaaaaaaaaaa

SEQ ID NO: 51 - DNA, 1053 bp, Homo sapiens
  sig_peptide 131..169: Von Heijne matrix score 4.19999980926514 seq MLAVSLTVPLLGA/MM
  polyA_site 1042..1053
gagcgagtcggacgggctgcgacagcgccggcccctgcggccgcaggtcgtcacagacgatgatggccaggccccggaggctaaggacggcagctcctttagcggcagagttttccgagtgaccttcttgatgctggctgtttctctcaccgttcccctgcttggagccatgatgctgctggaatctcctatagatccacagcctctcagcttcaaagaacccccgctcttgcttggtgttctgcatccaaatacgaagctgcgacaggcagaaaggctgtttgaaaatcaacttgttggaccggagtccatagcacatattggggatgtgatgtttactgggacagcagatggccgggtcgtaaaacttgaaaatggtgaaatagagaccattgcccggtttggttcgggcccttgcaaaacccgaggtgatgagcctgtgtgtgggagacccctgggtatccgtgcagggcccaatgggactctctttgtggccgatgcatacaagggactatttgaagtaaatccctggaaacgtgaagtgaaactgctgctgtcctccgagacacccattgaggggaagaacatgtcctttgtgaatgatcttacagtcactcaggatgggaggaagatttatttcaccgattctagcagcaaatggcaaagacgagactacctgcttctggtgatggagggcacagatgacgggcgcctgctggagtatgatactgtgaccagggaagtaaaagttttattggaccagctgcggttcccgaatggagtccagctgtctcctgcagaagactttgtcctggtggcagaaacaaccatggccaggatacgaagagtctacgtttctggcctgatgaagggcggggctgatctgtttgtggagaacatgcctggatttccagacaacatccggcccagcagctctggggggtactgggtgggcatgtcgaccatccgccctaaccctgggttttccatgctggatttcttatctgagagaccctggattaaaaggatgatttttaaggtaaaaaaaaaaaa

SEQ ID NO: 52 - DNA, 675 bp, Homo sapiens
  polyA_signal 638..643
  polyA_site 662..675
accgaacaggaacagcacaacctgggacccagacatgcagtacctctacgcaaagtaaaagtagcagtggttcagcacactttggtatgttgactgttaatgatgtacgtttctatagaaatgtcaggtccaaccatttcccatttgttcgactatgtggtctgttacatttatggcttaaagtccttttctcttaaacagttaaaaaaaaaatcttggtctaagtatttatttgaatcctgttgctataggagtttgtatgtgtgtgtcttcatttaaacatacctgcatacaaagatggtttatttctatttaatatgtgacatttgtttcctggatatagtccgtgaaccacaagatttatcatatttttcaataatatgagaagaaaatgggccgtaaattgttaaccattttatgttcagatatttctctagtttttacctagtttgctttaacatagagaccagcaagtgaatatatatgcataaccttatatgttgacacaataattcagaataatttgttaaagataaactaatttttcagagaagaacatttaaagggttaatatttttgaaacgttttcagataatatctatttgattattgtggcttctatttgaaatgtgtctaaaataaatgctgtttatttaaaatgaaaaaaaaaaaaaa

SEQ ID NO: 53 - DNA, 1112 bp, Homo sapiens
  sig_peptide 111..194: Von Heijne matrix score 4.80000019073486 seq GVLLEPFVHQVGG/HS
  polyA_signal 1080..1085
  polyA_site 1101..1112
ccgagagagactacacggtactgggacacacggacaaacaacagacagaagacgtactggccgctggactccgctgcctcccccatctccccgccatctgcgcccggaggatgagcccagccttcagggccatggatgtggagccccgcgccaaaggcgtccttctggagccctttgtccaccaggtcggggggcactcatgcgtgctccgcttcaatgagacaaccctgtgcaagcccctggtcccaagggaacatcagttctacgagaccctccctgctgagatgcgcaaattctctccccagtacaaaggacaaagccaaaggccccttgttagctggccatccctgccccattttttcccctggtcctttcccctgtggccacagggaagtgtggcctgaataccccaccccggctcctctgcacccagagctgggggccacctcagaagtgtcatctctctctgagcacgcattcccctgcagcagtcgaggactgagcagattgagtgatgctggggcagagaggcctgagaggaaaggtgttcagccagtcgtttgtaaggcgctcgtcggcacctgctgaaacgcccccacctgacagccccatcctcaaagactgtcttaattactcatggcaggttctagagacttaaggggaaaagctgctttcaaggccaccacatgtctgtgctccccaaccagctctatctgccttgtgttcattttgttattttgtgacgtgagacagcaaagaccaataaaaacatattttataagaacaaaaggcctgggtgcctacccgtgtgggggcactgtgggaagcctttgctagggtgtcttgtgctgtgtggtttgttttgtttgcccctttattttgctttgcttacccagtcttcccttactcttggatgcttcttaaccctcaggcaaacctgtgttccccctgtattcaggctctgctttaaagcaagccatgaggctgttggagtttctgtttagggcattaaaaattcccgcaaactataaagagcaatgttttcagtcttttaggattagaagaattacataaaaattaataaacattttcaatgatggaaaaaaaaaaaa

SEQ ID NO: 54 - DNA, 547 bp, Homo sapiens
  sig_peptide 359..454: Von Heijne matrix score 4 seq FSFMLLGMGGCLP/GF
  polyA_site 536..547
ctggggagccctgcctaagactcatgctacaagaagttaaataagtttcccgaagtcacacagctagcctctcatcccttttctactgagaggaagtggaatgcactccgacaaggataaggttttattgtgagctggccttggaattaaaccaccaccaacacacttttggattatcagaaggtggaaggagtgcaaaaatgtcattcccatgcttgtctgccaggcaacctggtgtccattctttatgacgcctttcctgaatcacaggtgcattggggtgcttcctcctccccaggactcccacccaactttgtgaacacaacccacttagaggagttatctcagcacattatgaatgttggggaccacgggcctcgggacacagggtccttcccagcaggctctgggctttttctcctttatgttacttggaatgggcgggtgcctgcctggattcctgctacagcctcccaatcgatctcctactttgcctgcatccacctttgcccattaaagtcaattctccacccataaaaaaaaaaaa

SEQ ID NO: 55 - DNA, 1198 bp, Homo sapiens
  sig_peptide 26..316: Von Heijne matrix score 4 seq RLPLVVSFIASSS/AN
  polyA_signal 1164..1169
  polyA_site 1187..1198
atcctgcgaaagaagggggttcatcatggcggatgacctaaagcgattcttgtataaaaagttaccaagtgttgaagggctccatgccattgttgtgtcagatagagatggagtacctgttgttaaagtggcaaatgacaatgctccagagcatgctttgcgacctggtttcttatccacttttgcccttgcaacagaccaaggaagcaaacttggactttccaaaaataaaagtatcatctgttactataacacctaccaggtggttcaatttaatcgtttacctttggtggtgagtttcatagccagcagcagtgccaatacaggactaattgtcagcctagaaaaggagcttgctccattgtttgaagaactgagacaagttgtggaagtttcttaatctgacagtggtttcagtgtgtaccttatcttcattataacaacacaatatcaatccagcaatctttagactacaataatgcttttatccatgtgctcaagaaagggcccctttttccaacttatactaaagagctagcatatagatgtaatttatagatagatcagttgctatattttctggtgtagggtctttcttatttagtgagatctagggataccacagaaatggttcagtctatcacagctcccatggagttagtctggtcaccagatatggatgagagattctattcagtggattagaatcaaactggtacattgatccacttgagccgttaagtgctgccaattgtacaatatgcccaggcttgcagaataaagccaactttttattgtgaataataataaggacatatttttcttcagattatgttttatttctttgcattgagtgaggtacataaaatggcttggtaaaagtaataaaatcagtacaatcactaactttcctttgtacatattattttgcagtatagatgaatattactaatcagtttgattattctcagagggtgctgctctttaatgaaaatgaaaattatagctaatgttttttcctcaaactctgctttctgtaaccaatcagtgttttaatgtttgtgtgttcttcataaaatttaaatacaattcgttattctgtttccaatgttagtatgtatgtaaacatgatagtacagccatttttttcatatgtgagtaaaaataaaatagtatttttaaaagtaaaaaaaaaaaa

SEQ ID NO: 56 - DNA, 1400 bp, Homo sapiens
  sig_peptide 36..107: Von Heijne matrix score 5.69999980926514 seq ILGLLGLLGTLVA/ML
  polyA_signal 1302..1307
  polyA_site 1389..1400
cagtccctgaagacgcttctactgagaggtctgccatggcctctcttggcctccaacttgtgggctacatcctaggccttctggggcttttgggcacactggttgccatgctgctccccagctggaaaacaagttcttatgtcggtgccagcattgtgacagcagttggcttctccaagggcctctggatggaatgtgccacacacagcacaggcatcacccagtgtgacatctatagcacccttctgggcctgcccgctgacatccaggctgcccaggccatgatggtgacatccagtgcaatctcctccctggcctgcattatctctgtggtgggcatgagatgcacagtcttctgccaggaatcccgagccaaagacagagtggcggtagcaggtggagtctttttcatccttggaggcctcctgggattcattcctgttgcctggaatcttcatgggatcctacgggacttctactcaccactggtgcctgacagcatgaaatttgagattggagaggctctttacttgggcattatttcttccctgttctccctgatagctggaatcatcctctgcttttcctgctcatcccagagaaatcgctccaactactacgatgcctaccaagcccaacctcttgccacaaggagctctccaaggcctggtcaacctcccaaagtcaagagtgagttcaattcctacagcctgacagggtatgtgtgaagaaccaggggccagagctggggggtggctgggtctgtgaaaaacagtggacagcaccccgagggccacaggtgagggacactaccactggatcgtgtcagaaggtgctgctgagggtagactgactttggccattggattgagcaaaggcagaaatgggggctagtgtaacagcatgcaggttgaattgccaaggatgctcgccatgccagcctttctgttttcctcaccttgctgctcccctgccctaagtccccaaccctcaacttgaaaccccattcccttaagccaggactcagaggatccctttgccctctggtttacctgggactccatccccaaacccactaatcacatcccactgactgaccctctgtgatcaaagaccctccctctggctgaggttggctcttagctcattgctggggatgggaaggagaagcagtggcttttgtgggcattgctctaacctacttctcaagcttccctccaaagaaactgattggccctggaacctccatcccactcttgttatgactccacagtgtccagactaatttgtgcatgaactgaaataaaaccatcctacggtatccagggaacagaaagcaggatgcaggatgggaggacaggaaggcagcctgggacatttaaaaaaataaaaaaaaaaaa

SEQ ID NO: 57 - DNA, 538 bp, Homo sapiens
  sig_peptide 35..130: Von Heijne matrix score 8 seq VPMLLLIAGGSFG/LR
  polyA_signal 505..510
  polyA_site 526..538
gcttggagttctgagccgatggaggagttcactcatgtttgcactcgcggtgatgcgtgcttttcgcaagaacaagactctcggctatggagtccccatgttgttgctgattgctggaggttcttttggtcttcgtgagttttctcaaatccgatatgatgctgtgaagagtaaaatggatcctgagcttgaaaaaaaaccgaaagagaataaaatatctttagagtcggaatatgagggaagtatctgttgaagggctactatctttccttggcccttctcccttgttgggactcaatctccagactatctccccagagaatcttgtcaaggcttggctttaagctttgttgggaaaatcaaagactccaagtttgatgactggaagaatattcgaggacccaggccttgggaagatcctgacctcctccaaggaagaaatccagaaagccttaagactaagacaacttgactctgctgattcttttttcctttttttttttaaataaaaatactattaactggaaaaaaaaaaaaa

SEQ ID NO: 58 - DNA, 1167 bp, Homo sapiens
  sig_peptide 169..267: Von Heijne matrix score 7.80000019073486 seq LTFLFLHLPPSTS/LF
  polyA_signal 1132..1137
  polyA_site 1155..1167
gtaggaactactgtcccagagctgaggcaaggggatttctcaggtcatttggagaacaagtgctttagtagtagtttaaagtagtaactgctactgtatttagtggggtggaattcagaagaaatttgaagaccagatcatgggtggtctgcatgtgaatgaacaggaatgagccagacagcctggctgtcattgctttcttcctccccatttggacccttctctgcccttacatttttgtttctccatctaccaccatccaccagtctatttattaacttagcaagaggacaaataaagggccctcttggcttgattttgcttctttctttctgtggaggatatactaagtgcgactttgccctatcctatttggaaatccctaacagaattgagttttctattatggatccaaaaagaaaaacaaaatgctaatgaagccatcagtcaagggtcacatgccaataaacaataaattttccagaagaaatgaaatccaactagacaaataaagtagagcttatgaaatggttcagtaaggatgagcttgttgttttttgttttgttttgttttgtttttttaaagacggagtctcgctctgtcactcaggctggagtgcagtggtatgatcttggctcactgtaacctccgcctcccgggttcaagccattctcctgcctcagtctcctgagtagctgggattgcaggtgcgtgccaccatgcctggctaatttttgtgtttttggtagagacagggtttcaccacgttggtcgggctggtctcgggctcctgacctcttgatccgcctgccttggcctcccaaagtgatgggattacagatgtgagccaccgtgcctagccaaggatgagatttttaaagtatgttccagttctgtgtcatggttggaagacagagtaggaaggatatggaaaaggtcatggggaagcagaggtgattcatggctctgtgaatttgaggtgaatggttccttattgtctaggccacttgtgaagaatatgagtcagttattgccagccttggaatttacttctctagcttacaatggaccttttgaactgggaaacaccttgtctgcattcactttaaaatgtcaaaactaatttttataataaatgtttattttcacatcgaaaaaaaaaaaaa

SEQ ID NO: 59 - DNA, 730 bp, Homo sapiens
  sig_peptide 143..238: Von Heijne matrix score 8.80000019073486 seq VPMLLLIVGGSFG/LR
  polyA_signal 697..702
  polyA_site 721..730
  misc_feature 1,14,28,52: n=a, g, c or t
nctttgcctttctntccacaggtgtccnctcccaggtccaactgcagacttngaattcgtcttggtgagagcgtgagctgctgagatttgggagtctgcgctaggcccgcttggagttctgagccgatggaagagttcactcatgtttgcacccgcggtgacgcgtgcttttcgcaagaacaagactctcggctatggagtccccatgttgttgctgattgttggaggttcttttggtcttcgtgagttttctcaaatccgatatgatgctgtgaagagtaaaatggatcctgagcttgaaaaaaaactgaaagagaataaaatatctttagagtcggaatatgagaaaatcaaagactccaagtttgatgactggaagaatattcgaggacccaggccttgggaagatcctgacctcctccaaggaagaaatccagaaagccttaagactaagacaacttgactctgctgattctcttttcctttttttttttaaataaaaatactattaactggacttcctaatatatacttctatcaagtggaaaggaaattccaggcccatggaaacttggatatgggtaatttgatgacaaataatcttcactaaaggtcatgtacaggtttttatacttcccagctattccatctgtggatgaaagtaacaatgttggccacgtatattttacacctcgaaataaaaaatgtgaatactgctccaaaaaaaaaa

SEQ ID NO: 60 - DNA, 1174 bp, Homo sapiens
  sig_peptide 108..170: Von Heijne matrix score 5.5 seq SFLPSALVIWTSA/AF
  polyA_signal 1141..1146
  polyA_site 1161..1174
cacgttcctgttgagtacacgttcctgttgatttacaaaaggtgcaggtatgagcaggtctgaagactaacattttgtgaagttgtaaaacagaaaacctgttagaaatgtggtggtttcagcaaggcctcagtttccttccttcagcccttgtaatttggacatctgctgctttcatattttcatacattactgcagtaacactccaccatatagacccggctttaccttatatcagtgacactggtacagtagctccagaaaaatgcttatttggggcaatgctaaatattgcggcagttttatgcattgctaccatttatgttcgttataagcaagttcatgctctgagtcctgaagagaacgttatcatcaaattaaacaaggctggccttgtacttggaatactgagttgtttaggactttctattgtggcaaacttccagaaaacaaccctttttgctgcacatgtaagtggagctgtgcttacctttggtatgggctcattatatatgtttgttcagaccatcctttcctaccaaatgcagcccaaaatccatggcaaacaagtcttctggatcagactgttgttggttatctggtgtggagtaagtgcacttagcatgctgacttgctcatcagttttgcacagtggcaattttgggactgatttagaacagaaactccattggaaccccgaggacaaaggttatgcgcttcacatgatcactactgcagcagaatggtctatgtcattttccttctttggttttttcctgacttacattcgtgattttcagaaaatttccttacgggtggaagccaacttacatggattaaccctctatgacactgcaccttgccctattaacaatgaacgaacacggctactttccagagatattagatgaaaggataaaatatttctgtaatgattatgattctcagggattggggaaaggttcacagaagttgcttattcttctctgaaattttcaaccacttaatcaaggctgacagtaacactgatgaatgctgataatcaggaaacatgaaagaagccatttgatagattattctaaaggatatcatcaagaagactattaaaaacacctatgcctatacttttttatctcagaaaataaagtcaaaagactatgaaaaaaaaaaaaaa

SEQ ID NO: 61 - DNA, 1158 bp, Homo sapiens
  polyA_signal 1133..1138
  polyA_site 1146..1158
  misc_feature 652: n=a, g, c or t
aarttgagcttggggactgcagctgtggggagatttcagtgcattgcctcccctgggtgctcttcatcttggatttgaaagttgagagcagcatgttttgcccactgaaactcatcctgstgrsagtgtamtggattattccttgggcctgaatgacttgaatgtttccccgcctgagctaacagtccatgtgggtgattcagctctgatgggatgtgttttccagagcacagaagacaaatgtatattcaagatagactggactctgtcaccaggagagcacgccaaggacgaatatgtgctatactattactccaatctcagtgtgcctattgggcgcttccagaaccgcgtacacttgatgggggacatcttatgcaatgatggctctctcctgctccaagatgtgcaagaggctgaccagggaacctatatctgtgaaatccgcctcaaaggggagagccaggtgttcaagaaggcggtggtactgcatgtgcttccagaggagcccaaaggtacgcaaatgcttacttaaagaggggccaaggggcaagagctttcatgtgcaagaggcaaggaaactgattatcttgagtaaatgccagcctttgggctaagtacttaccacagagtgaatcttcaaagaaatgantcattaaattatttcagrtcagaataaaaatakgagttattttagttaakaataaaatattgataattattgtattattactttaaacacacttccccctcacaaaagccctgtgaaggatgttttgttcacatataatgtccaaatatgttttggacacatatttattaaatggaataaatagtamttgaaccctggcaccthtgacaacaaagtcyatgttytttttactatgccctaatacctttsatcagttatccacattgatgctacatytgtattttataggtaccctatgttaggtgttttgggggatagaaaagaaataagcagkycaggctcagtggctcatgcctgtaatcctagcattttgggaggctgaggcagcagaamtgcctgagccccagggttcaagactgcagtgagctatgawggcaccactgcattytagcctgggwgacagagcaagactytgtttaaaataaaaaaagagaaaaaaaaaaaaa

SEQ ID NO: 62 - DNA, 754 bp, Homo sapiens
  sig_peptide 5..142: Von Heijne matrix score 6.59999990463257 seq VCCYLFWLIAILA/QL
  polyA_signal 716..721
  polyA_site 742..754
tgtgatgagcgtgttctggggcttcgtcggcttcttggtgccttggttcatccccaagggtcctaaccggggagttatcattaccatgttggtgacctgttcagtttgctgctatctcttttggctgattgcaattctggcccaactcaaccctctctttggaccgcaattgaaaaatgaaaccatctggtatctgaagtatcattggccttgaggaagaagacatgctctacagtgctcagtctttgaggtcacgagaagagaatgccttctagatgcaaaatcacctctaaaccagaccacttttcttgacttgcctgttttggccattagctgccttaaacgttaacagcacatttgaatgccttattctacaatgcagcgtgttttcctttgccttttttgcactttggtgaattacgtgcctccataacctgaactgtgccgactccacaaaacgattatgtactcttctgagatagaagatgctgttcttctgagagatacgttactctctccttggaatctgtggatttgaagatggctcctgccttctcacgtgggaatcagtgaagtgtttagaaactgctgcaagacaaacaagactccagtggggtggtcagtaggagagcacgttcagagggaagagccatctcaacagaatcgcaccaaactatactttcaggatgaatttcttctttctgccatcttttggaataaatattttcctcctttctatgtaaaaaaaaaaaaa

SEQ ID NO: 63 - DNA, 1073 bp, Homo sapiens
  sig_peptide 98..181: Von Heijne matrix score 3.59999990463257 seq PLSDSWALLPASA/GV
  polyA_signal 1035..1040
  polyA_site 1060..1073
ccgattacagctaggtagtggagcgccgctgcttacctgggtgcaggagacagccggagtcgctgggggagctccgcgccgccggacgcccgtgaccatgtggaggctgctggctcgcgctagtgcgccgctcctgcgggtgcccttgtcagattcctgggcactcctccccgccagtgctggcgtaaagacactgctcccagtaccaagttttgaagatgtttccattcctgaaaaacccaagcttagatttattgaaagggcaccacttgtgccaaaagtaagaagagaacctaaaaatttaagtgacatacggggaccttccactgaagctacggagtttacagaaggcaattttgcaatcttggcattgggtggtggctacctgcattggggccactttgaaatgatgcgcctgacaatcaaccgctctatggaccccaagaacatgtttgccatatggcgagtaccagcccctttcaagcccatcactcgcaaaagtgttgggcatcgcatggggggaggcaaaggtgctattgaccactacgtgacacctgtgaaggctggccgccttgttgtagagatgggtgggcgttgtgaatttgaagaagtgcaaggtttccttgaccaggttgcccacaagttgcccttcgcagcaaaggctgtgagccgcgggactctagagaagatgcgaaaagatcaagaggaaagagaacgtaacaaccagaacccctggacatttgagcgaatagccactgccaacatgctgggcatacggaaagtactgagcccatatgacttgacccacaaggggaaatactggggcaagttctacatgcccaaacgtgtgtagtgagtgtaggagataactgtatataggctactgaaagaaggattctgcatttctattcccctcagcctacccactgaagtctttgggtagctcttaagccataactaaggagcagcatttgagtagatttctgaaaaacgatgttatttgttgatttaaaaagaaaactgtatttttattaaataaaatttaaacatcacttcaggaaaaaaaaaaaaaa

SEQ ID NO: 64 - DNA, 413 bp, Homo sapiens
  sig_peptide 46..189: Von Heijne matrix score 4.09999990463257 seq VFMLIVSVLALIP/ET
  polyA_signal 377..382
  polyA_site 402..413
tgagaagagttgagggaaagtgctgctgctgggtctgcagacgcgatggataacgtgcagccgaaaataaaacatcgccccttctgcttcagtgtgaaaggccacgtgaagatgctgcggctggatattatcaactcactggtaacaacagtattcatgctcatcgtatctgtgttggcactgataccagaaaccacaacattgacagttggtggaggggtgtttgcacttgtgacagcagtatgctgccttgccgacggggcccttatttaccggaagcttctgttcaatcccagcggtccttaccagaaaaagcctgtgcatgaaaaaaaagaagttttgtaattttatattactttttagtttgatactaagtattaaacatatttctgtattcttccaaaaaaaaaaaa

SEQ ID NO: 65 - DNA, 609 bp, Homo sapiens
  sig_peptide 139..231: Von Heijne matrix score 4.40000009536743 seq TCCHLGLPHPVRA/PR
  polyA_signal 579..584
  polyA_site 598..609
tgtcggagttggaaagggacgcctggtttccccccaagcgaaccgggatgggaagtgacttcaatgagattgaacttcagctggattgaaagagaggctagaagttccgcttgccagcagcctccttagtagagcggaatgagtaatacccacacggtgcttgtctcacttccccatccgcacccggccctcacctgctgtcacctcggcctcccacacccggtccgcgctccccgccctcttcctcgcgtagaaccgtgggatcctaggtggcaggactcagagctaaggtatccacaggccatgaattccttcctaaatgagcggtcatcgccgtgcaggaccttaaggcaagaagcatcggctgacagatgtgatctctgaacctgatagattgctgattttatcttattttatccttgacttggtacaagttttgggatttctgaaaagaccatacagataaccacaaatatcaagaaagtcgtcttcagtattaagtagaatttagatttaggtttccttcctgcttcccacctccttcgaataaggaaacgtctttgggaccaactttatggaataaataagctgagctgcaaaaaaaaaaaa

SEQ ID NO: 66 - DNA, 522 bp, Homo sapiens
  polyA_site 512..522
  misc_feature 11: n=a, g, c or t
ccaactgcagnttcgaatttaccgagcggagaggagatgcacacggcactcgagtgtgaggaaaaatagaaatgaaggtacatatgcacacaaaattttgcctcatttgtttgctgacatttatttttcatcattgcaaccattgccatgaagaacatgaccatggccctgaagcgcttcacagacagcatcgtggaatgacagaattggagccaagcaaattttcaaagcaagctgctgaaaatgaaaaaaaatactatattgaaaaactttttgagcgttatggtgaaaatggaagattatccttttttggtttggagaaacttttaacaaacttgggccttggagagagaaaagtagttgagattaatcatgaggatcttggccacgatcatgtttctcatttaggtattttggcagttcaagagggaaagcattttcactcacataaccaccagcattcccataatcatttaaattcagaaaatcaaactgtgaccagtgtatccacaaaaaaaaaaa

SEQ ID NO: 67 - DNA, 1322 bp, Homo sapiens
  sig_peptide 126..260: Von Heijne matrix score 4.59999990463257 seq VLVYLVTAERVWS/DD
  polyA_signal 1283..1288
  polyA_site 1309..1322
ccgaaaaccttccccgcttctggatatgaaattcaagctgcttgctgagtcctattgccggctgctgggagccaggagagccctgaggagtagtcactcagtagcagctgacgcgtgggtccaccatgaactggagtatctttgagggactcctgagtggggtcaacaagtactccacagcctttgggcgcatctggctgtctctggtcttcatcttccgcgtgctggtgtacctggtgacggccgagcgtgtgtggagtgatgaccacaaggacttcgactgcaatactcgccagcccggctgctccaacgtctgctttgatgagttcttccctgtgtcccatgtgcgcctctgggccctgcagcttatcctggtgacatgcccctcactgctcgtggtcatgcacgtggcctaccgggaggttcaggagaagaggcaccgagaagcccatggggagaacagtgggcgcctctacctgaaccccggcaagaagcggggtgggctctggtggacatatgtctgcagcctagtgttcaaggcgagcgtggacatcgcctttctctatgtgttccactcattctaccccaaatatatcctccctcctgtggtcaagtgccacgcagatccatgtcccaatatagtggactgcttcatctccaagccctcagagaagaacattttcaccctcttcatggtggccacagctgccatctgcatcctgctcaacctcgtggagctcatctacctggtgagcaagagatgccacgagtgcctggcagcaaggaaagctcaagccatgtgcacaggtcatcacccccacgataccacctcttcctgcaaacaagacgacctcctttcgggtgacctcatctttctgggctcagacagtcatcctcctctcttaccagaccgcccccgagaccatgtgaagaaaaccatcttgtgaggggctgcctggactggtctggcaggttgggcctggatggggaggctctagcatctctcataggtgcaacctgagagtgggggagctaagccatgaggtaggggcaggcaagagagaggattcagacgctctgggagccagttcctagtcctcaactccagccacctgccccagctcgacggcactgggccagttccccctctgctctgcagctcggtttccttttctagaatggaaatagtgagggccaatgcccagggttggagggaggagggcgttcatagaagaacacacatgcgggcaccttcatcgtgtgtggcccactgtcagaacttaataaaagtcaactcatttgctggttaaaaaaaaaaaaaa

SEQ ID NO: 68 - DNA, 1290 bp, Homo sapiens
  sig_peptide 50..160: Von Heijne matrix score 4 seq PLSLDCGHSLCRA/CI
  polyA_site 1280..1290
gaggagagcctcaggagttaggaccagaagaagccagggaagcagtgcaatggcttcaaaaatcttgcttaacgtacaagaggaggtgacctgtcccatctgcctggagctgttgacagaacccttgagtctagactgtggccacagcctctgccgagcctgcatcactgtgagcaacaaggaggcagtgaccagcatgggaggaaaaagcagctgtcctgtgtgtggtatcagttactcatttgaacatctacaggctaatcagcatctggccaacatagtggagagactcaaggaggtcaagttgagcccagacaatgggaagaagagagatctctgtgatcatcatggagagaaactcctactcttctgtaaggaggataggaaagtcatttgctggctttgtgagcggtctcaggagcaccgtggtcaccacacagtcctcacggaggaagtattcaaggaatgtcaggagaaactccaggcagtcctcaagaggctgaagaaggaagaggaggaagctgagaagctggaagctgacatcagagaagagaaaacttcctggaagtatcaggtacaaactgagagacaaaggatacaaacagaatttgatcagcttagaagcatcctaaataatgaggagcagagagagctgcaaagattggaagaagaagaaaagaagacgctggataagtttgcagaggctgaggatgagctagttcagcagaagcagttggtgagagagctcatctcagatgtggagtgtcggagtcagtggtcaacaatggagctgctgcaggacatgagtggaatcatgaaatggagtgagatctggaggctgaaaaagccaaaaatggtttccaagaaactgaagactgtattccatgctccagatctgagtaggatgctgcaaatgtttagagaactgacagctgtccggtgctactgggtggatgtcacactgaattcagtcaacctaaatttgaatcttgtcctttcagaagatcagagacaagtgatatctgtgccaatttggccttttcagtgttataattatggtgtcttgggatcccaatatttctcctctgggaaacattactgggaagtggacgtgtccaagaaaactgcctggatcctgggggtatactgtagaacatattcccgccatatgaagtatgttgttagaagatgtgcaaatcgtcaaaatctttacaccaaatacagacctctatttggctactgggttatagggttacagaataaatgtaagtatggtgccaaaaaaaaaaa

SEQ ID NO: 69 - DNA, 1364 bp, Homo sapiens
  sig_peptide 83..139: Von Heijne matrix score 8.60000038146973 seq LLWLALACSPVHT/TL
  polyA_site 1356..1354
gcctgggagctgaggcagccaccgtctcagcctggccagccctctggaccccgaggttggaccctactgtgacacacctaccatgcggacactcttcaacctcctctggcttgccctggcctgcagccctgttcacactaccctgtcaaagtcagatgccaaaaaagccgcctcaaagacgctgctggagaagagtcagttttcagataagccggtgcaagaccggggtttggtggtgacggacctcaaagctgagagtgtggttcttgagcatcgcagctactgctcggcaaaggcccgggacagacactttgctggggatgtactgggctatgtcactccatggaacagccatggctacgatgtcaccaaggtctttgggagcaagttcacacagatctcacccgtctggctgcagttgaagagacgtggccgtgagatgtttgaggtcacgggcctccacgacgtggaccaagggtggatgcgagctgtcaggaagcatgccaagggcctgcacatagtgcctcggctcctgtttgaggactggacttacgatgatttccggaacgtcttagacagtgaggatgagatagaggagctgagcaagaccgtggtccaggtggcaaagaaccagcatttcgatggcttcgtggtggaggtctggaaccagctgctaagccagaagcgcgtgggcctcatccacatgctcacccacttggccgaggccctgcaccaggcccggctgctggccctcctggtcatcccgcctgccatcacccccgggaccgaccagctgggcatgttcacgcacaaggagtttgagcagctggcccccgtgctggatggtttcagcctcatgacctacgactactctacagcgcatcagcctggccctaatgcacccctgtcctgggttcgagcctgcgtccaggtcctggacccgaagtccaagtggcgaagcaaaatcctcctggggctcaacttctatggtatggactacgcgacctccaaggatgcccgtgagcctgttgtcggggccaggtacatccagacactgaaggaccacaggccccggatggtgtgggacagccaggcctcagagcacttcttcgagtacaagaagagccgcagtgggaggcacgtcgtcttctacccaaccctgaagtccctgcaggtgcggctggagctggcccgggagctgggcgttggggtctctatctgggagctgggccagggcctggactacttctacgacctgctctaggtgggcattgcggcctccgcggtggacgtgttcttttctaagccatggagtgagtgagcaggtgtgaaatacaggcctccactccgtttgcaaaaaaaaa

SEQ ID NO: 70 - DNA, 1470 bp, Homo sapiens
  sig_peptide 57..95: Von Heijne matrix score 3.90000009536743 seq MLLSIGMLMLSAT/QV
  polyA_signal 1438..1443
  polyA_site 1458..1470
gctggcaagactgtttgtgttgcgggggccggacttcaaggtgattttacaacgagatgctgctctccatagggatgctcatgctgtcagccacacaagtctacaccgtcttgactgtccagctctttgcattcttaaacccactgcctgtagaagcagacattttagcatataactttgaaaatgcatctcagacatttgatgacctccctgcaagatttggttatagacttccagctgaaggtttaaagggttttttaattaactcaaaaccagagaatgcctgtgaacccatagtgcctccaccagtaaaagacaattcatctggcactttcatcgtgttaattagaagacttgattgtaattttgatataaaggttttaaatgcacagagagcaggatacaaggcagccatagttcacaatgttgattctgatgacctcattagcatgggatccaacgacattgaggtactaaagaaaattgacattccatctgtctttattggtgaatcatcagctagttctctgaaagatgaattcacatatgaaaaagggggccaccttatcttagttccagaatttagtcttcctttggaatactacctaattcccttccttatcatagtgggcatctgtctcatcttgatagtcattttcatgatcacaaaatttgtccaggatagacatagagctagaagaaacagacttcgtaaagatcaacttaagaaacttcctgtacataaattcaagaaaggagatgagtatgatgtatgtgccatttgtttggatgagtatgaagatggagacaaactcagaatccttccctgttcccatgcttatcattgcaagtgtgtagacccttggctaactaaaaccaaaaaaacctgtccagtgtgcaggcaaaaagttgttccttctcaaggcgattcagactctgacacagacagtagtcaagaagaaaatgaagtgacagaacatacccctttactgagacctttagcttctgtcagtgcccagtcatttggggctttatcggaatcccgctcacatcagaacatgacagaatcttcagactatgaggaagacgacaatgaagatactgacagtagtgatgcagaaaatgaaattaatgaacatgatgtcgtggtccagttgcagcctaatggtgaacgggattacaacatagcaaatactgtttgactttcagaagatgattggtttatttccctttaaaatgattaggtatatactgtaatttgattttttgctcccttaaaagatttctgtagaaataacttattttttagtactctacagtttaatcaaattactgaaacaggacttttgatctggtatttatctgccaagaatatacttcattcactaataatagactggtgctgtaactcaagcatcaattcagctcttcttttggaatgaaagtatagccaaaacaaaaaaaaaaaaa

SEQ ID NO: 71 - DNA, 982 bp, Homo sapiens
  sig_peptide 72..197: Von Heijne matrix score 7.19999980926514 seq ILFSLSFLLVIIT/FP
  polyA_site 970..982
gctgcctgttcttcacacttagctccaaacccatgaaaaattgccaagtataaaagcttctcaagaatgagatggattctagggtgtcttcacctgagaagcaagataaagagaatttcgtgggtgtcaacaataaacggcttggtgtatgtggctggatcctgttttccctctctttcctgttggtgatcattaccttccccatctccatatggatgtgcttgaagatcattagggagtatgaacgtgctgttgtattccgtctgggacgcatccaagctgacaaagccaaggggccaggtttgatcctggtcctgccatgcatagatgtgtttgtcaaggttgacctccgaacagttacttgcaacattcctccacaagagatcctcaccagagactccgtaactactcaggtagatggagttgtctattacagaatctatagtgctgtctcagcagtggctaatgtcaacgatgtccatcaagcaacatttctgctggctcaaaccactctgagaaatgtcttagggacacagaccttgtcccagatcttagctggacgagaagagatcgcccatagcatccagactttacttgatgatgccaccgaactgtgggggatccgggtggcccgagtggaaatcaaagatgttcggattcccgtgcagttgcagagatccatggcagccgaggctgaggccacccgggaagcgagagccaaggtccttgcagctgaaggagaaatgagtgcttccaaatccctgaagtcagcctccatggtgctggctgagtctcccatagctctccagctgcgctacctgcagaccttgagcacggtagccaccgagaagaattctacgattgtgtttcctctgcccatgaatatactagagggcattggtggcgtcagctatgataaccacaagaagcttccaaataaagcctgaggtcctcttgcggtagtcagctaaaaaaaaaaaaa

SEQ ID NO: 72 - DNA, 455 bp, Homo sapiens
  polyA_signal 425..430
  polyA_site 443..455
gttatgccacccagaaacctactggagttacttattaacatcaaggctggaacctatttgcctcagtcctatctgattcatgagcacatggttattactgatcgcatcgaaaacattgatcacctgggtttctttatttatcgactgtgtcatgacaaggaaacttacaaactgcaacgcagagaaactattaaaggtattcagaaacgtgaagccagcaattgtttcgcaattcggcattttgaaaacaaatttgccgtggaaactttaatttgttcttgaacagtcaagaaaaacattattgaggaaaattaatatcacagcataaccccaccctttacattttgtgcagtgattattttttaaagtcttctttcatgtaagtagcaaacagggctttactatcttttcatctcattaattcaattaaaaccattaccccaaaaaaaaaaaaa

SEQ ID NO: 73 - DNA, 738 bp, Homo sapiens
  sig_peptide 90..278: Von Heijne matrix score 3.5 seq GLVCAGLADMARP/AE
  polyA_signal 704..709
  polyA_site 724..738
gggaaaagtgactagctccccttcgttgtcagccagggacgagaacacagccacgctcccacccggctgccaacgatccctcggcggcgatgtcggccgccggtgcccgaggcctgcgggccacctaccaccggctccccgataaagtggagctgatgctgcccgagaaattgaggccgttgtacaaccatccagcaggtcccagaacagttttcttctgggctccaattatgaaatgggggttggtgtgtgctggattggctgatatggccagacctgcagaaaaacttagcacagctcaatctgctgttttgatggctacagggtttatttggtcaagatactcacttgtaattattccgaaaaattggagtctgtttgctgttaatttctttgtgggggcagcaggagcctctcagctttttcgtatttggagatataaccaagaactaaaagctaaagcacacaaataaaagagttcctgatcacctgaacaatctagatgtggacaaaaccattgggacctagtttattatttggttattgataaagcaaagctaactgtgtgtttagaaggcactgtaactggtagctagttcttgattcaatagaaaaatgcagcaaacttttaataacagtctctctacatgacttaaggaacttatctatggatattagtaacatttttctaccatttgtccgtaataaaccatacttgctcgtaaaaaaaaaaaaaaa

SEQ ID NO: 74 - DNA, 649 bp, Homo sapiens
  sig_peptide 88..147: Von Heijne matrix score 12.3999996185303 seq ALLLGALLGTAWA/RR
  polyA_signal 619..624
  polyA_site 637..649
ccaaagtgagagtccagcggtcttccagcgcttgggccacggcggcggccctgggagcagaggaggagcgaccccattacgctaaagatgaaaggctggggttggctggccctgcttctgggggccctgctgggaaccgcctgggctcggaggagccaggatctccactgtggagcatgcagggctctggtggatgaactagaatgggaaattgcccaggtggaccccaagaagaccattcagatgggatccttccggatcaatccagatggcagccagtcagtggtggaggtaactgttactgttcccccaaacaaagtagctcactctggctttggatgaaattcgactgcttaaaaaggaccttggtctaatagaaatgaagaaaacagactcagaaaaaagatttggctctgtctcatttggaagaagctgcaggcttattccccatgcacttgcttcctggctgcaaaccttaatactttgtttctgctgtagaatttgttagcaaacagggagtcctgatcagcacccttctccacatccacatgactggtttttaatgtagcactgtggtatacatgcaaacatccgttcaaaatctgagtcggagctaaaaataaaaaatgaaaaaacaaaaaaaaaaaaa

SEQ ID NO: 75 - DNA, 714 bp, Homo sapiens
  sig_peptide 33..92: Von Heijne matrix score 12.3999996185303 seq ALLLGALLGTAWA/RR
  polyA_site 703..714
agcagaggtggagcgaccccattacgctaaagatgaaaggctggggttggctggccctgcttctgggggccctgctgggaaccgcctgggctcggaggagccaggatctccactgtggagcatgcagggctctggtggatgaactagaatgggaaattgcccaggtggaccccaagaagaccattcagatgggatctttccggatcaatccagatggcagccagtcagtggtggaggtgccttatgcccgctcagaggcccacctcacagagctgctggaggagatatgtgaccggatgaaggagtatggggaacagattgatccttccacccatcgcaagaactacgtacgtgtagtgggccggaatggagaatccagtgaactggacctacaaggcatccgaatcgactcagatattagcggcaccctcaagtttgcgtgtgggagcattgtggaggaatacgaggatgaactcattgaattcttttcccgagaggctgacaatgttaaagacaaactttgcagtaagcgaacagatctttgtgaccatgccctgcacatatcgcatgatgagctatgaaccactggagcagcccacactggcttgatggatcacccccaggaggggaaaatggtggcaatgccttttatatattatgtttttactgaaattaactgaaaaaatatgaaaccaaaagtacaaaaaaaaaaaa

SEQ ID NO: 76 - DNA, 596 bp, Homo sapiens
  sig_peptide 33..107: Von Heijne matrix score 5 seq MFAASLLAMCAGA/EV
  polyA_signal 546..551
  polyA_site 584..596
cacagttcctctcctcctagagcctgccgaccatgcccgcgggcgtgcccatgtccacctacctgaaaatgttcgcagccagtctcctggccatgtgcgcaggggcagaagtggtgcacaggtactaccgaccggacctgacaatacctgaaattccaccaaagcgtggagaactcaaaacggagcttttgggactgaaagaaagaaaacacaaacctcaagtttctcaacaggaggaacttaaataactatgccaagaattctgtgaataatataagtcttaaatatgtatttcttaatttattgcatcaaactacttgtccttaagcacttagtctaatgctaactgcaagaggaggtgctcagtggatgtttagccgatacgttgaaatttaattacggtttgattgatatttcttgaaaactgccaaagcacatatcatcaaaccatttcatgaatatggtttggaagatgtttagtcttgaatataacgcgaaatagaatatttgtaagtctactatatgggttgtctttatttcatataaattaagaaattatttaaaactatgaactagtttcattaaaaaaaaaagaa

SEQ ID NO: 77 - DNA, 403 bp, Homo sapiens
  polyA_signal 375..380
  polyA_site 390..403
tgaagagaatggctgttgcagtcggcgtcagagcagctccagtgccggggattcggacggagagcgcgaggactcggcggctgagcgcgcccgacagcagctagaggcgctgctcaacaagactatgcgcattcgcatgacagatggacggacactggtcggctgctttctctgcactgaccgtgactgcaatgtcatcctgggctcggcgcaggagttcctcaagccgtcggattccttctctgccggggagccccgtgtgctgggcctggccatggtacccggacaccacatcgtttccattgaggtgcagagggagagtctgaccgggcctccgtatctctgaccacgatggcgcttacctttcagacttcattaaacttatgaccaaaaaaaaaaaaaa

SEQ ID NO: 78 - DNA, 727 bp, Homo sapiens
  sig_peptide 126..575: Von Heijne matrix score 8.60000038146973 seq LELLTSCSPPASA/SQ
  polyA_signal 670..675
  polyA_site 721..727
  misc_feature 257,376..377: n=a, g, c or t
ctcagaactgtgctgggaaggatggtagggcgactggggctcacctccgcaccgttgtaggacccggggtagggttttgagcccgtgggagctgccccacgcggcctcgtcctgccaacggtcggatggcggagacgaaggacacagcgcagatgttggtgaccttcaaggatgtggctgtgacctttacccgggaggagtggagacagctggacctggcccagaggaccctgtaccgagagggcatcgggttcccnaaaccagagttggtccacctgctagagcatgggcaggagctgtggatagtgaagagaggcctctcacatgctacctgtgcagagtttcactcttgttgcccaggctggagtgcagtggnncgccatctcagctcactgcaacttctgcctcccgagttcaagggattctcctgcctcagcctcccgagtagctgggattacaggcgcccaccaccatgcccggctggtttttttgtatttttagtagagacggggcttcaccatgttggccaggctggtcttgaactcttgacctcatgtagtccacccgcctctgcctcccaaagtgctgcgattacaggcgtgagccaccgtgcccggcagagaaaaactgcttaaggttgaaaagagaaatttaagaaattgctgacggaataaaaacataatagaactacaacaccgaaggaaatgaaagaagcaaaaaaaaaaaa

SEQ ID NO: 79 - DNA, 944 bp, Homo sapiens
  sig_peptide 90..155: Von Heijne matrix score 5.90000009536743 seq IILGCLALFLLLQ/RK
  polyA_signal 913..918
  polyA_site 932..944
gaatcaggttccgtagcccacagaaaagaagcaagggacggcaggactgtttcacacttttctgcttctggaaggtgctggacaaaaacatggaactaatttccccaacagtgattataatcctgggttgccttgctctgttcttactccttcagcggaagaatttgcgtagacccccgtgcatcaagggctggattccttggattggagttggatttgagtttgggaaagcccctctagaatttatagagaaagcaagaatcaaggtatgtggtcgtggcagacggggtctccagaggagacaatgctttcttttttaaactttctttcattgactcttaagtgcagggctagaacacggggaacatacctgcttgcctcaactaaaggatctagtcatttctgaattcctctactaacaattaacaacaatatcctgtgcaaaattttgcgaaagaaatgaaatacaattgcagcgtgcatcgacatttttggaagtagagattaacttttcgtatttttacttcatcgaagttaagttccaaatgtgtatgtgttaagtaaatgttttcagtaattgggaaagataaagtgtaatccaatttaagtttgtgaaaatgagtaattcgtatccaaattggagttaacaccaaagtattgtacaaattgcttgcacagttggtccgtacacaatagacaggctctgtatttttagctgacgttgttatttgatgatgatgtactccattttcactacggcccgaagagactagtaatcctccttgtagtagatgtttttgtcttgaaagtatcttttaaatgtctgagcactttaaggaacagacccttattaatgtcttttaagttttattcaatttccagtcacaaatattttatggtatttgattgtctaataaatttgtatgatattaaaaaaaaaaaaa

SEQ ID NO: 80 - DNA, 598 bp, Homo sapiens
  sig_peptide 126..287: Von Heijne matrix score 3.90000009536743 seq LETCGLLVSLVES/IW
  polyA_signal 561..566
  polyA_site 587..598
ctcagaactgtgctgggaaggatggtagggcgactggggctcacctccgcaccgttgtaggacccggggtagggttttgagcccgtgggagctgccccacgcggcctcgtcctgccaacggtcggatggcggagacgaaggacgcagcgcagatgttggtgaccttcaaggatgtggctgtgacctttacccgggaggagtggagacagctggacctggcccagaggaccctgtaccgagaggtgatgctggagacctgtgggcttctggtttcactagtggaaagcatttggctgcatataacagaaaaccagatcaaactggcttcacctggaaggaaattcactaactcgcctgatgagaagcctgaggtgtggttggctccaggcctgttcggtgccgcagcccagtgacgccatcaaggatgtcttggttctctgttccttcttcttggttcaggcttctgattgtcctcaggctggctcctcatagggatgctgggtgctgcagccttgactggggcagcaggcccccatgttcaatccatcctcccaccttggaataaatgctttcttttcacaatgagaaaaaaaaaaaa

SEQ ID NO: 81 - DNA, 360 bp, Homo sapiens
  sig_peptide 85..150: Von Heijne matrix score 5.90000009536743 seq IILGCLALFLLLQ/RK
  polyA_site 349..360
caggttccgtagccacagaaaagaagcaagggacggcaggactgtttcacacttttctgcttctggaaggtgctggacaaaaacatggaactaatttccccaacagtgattataatcctgggttgccttgctctgttcttactccttcagcggaagaatttgcgtagacccccgtgcatcaagggctggattccttggattggagttggatttgagtttgggaaagcccctctagaatttatagagaaagcaagaatcaagtatggaccaatatttacagtctttgctatgggaaaccgaatgacctttgttactgaagaagaaggaattaatgtgtttctaaaatccaaaaaaaaaaaa

SEQ ID NO: 82 - DNA, 490 bp, Homo sapiens
  sig_peptide 77..124: Von Heijne matrix score 4.80000019073486 seq SLFIYIFLTCSNT/SP
  polyA_signal 461..466
  polyA_site 477..490
atgagcttccagccccaagagtggaggctgccacatcccaacatagtatctattgaaaaggaagcagtgtgtatctatgattatatctctgttcatctatatatttttgacatgtagcaacacctctccatcttatcaaggaactcaactcggtctgggtctccccagtgcccagtggtggcctttgacaggtaggaggatgcagtgctgcaggctattttgttttttgttacaaaactgtcttttcccttttcccctccacctgattcagcatgatccctgtgagctggttctcacaatctcctgggactgggctgaggcaggggcttcgctctattctccctaaccatactgtcttcctttcccccttgccacttagcagttatccccccagctatgccttctccctccctcccttgccctggcatatattgtgccttatttatgctgcaaatataacattaaactatcaagtgaaaaaaaaaaaaaa

SEQ ID NO: 83 - DNA, 488 bp, Homo sapiens
  polyA_signal 458..463
  polyA_site 475..488
ccgcttccgaaaagagacagacaatgcagccatcataatgaaggtggacaaagaccggcagatggtggtgctggaggaagaatttcggaacatttccccagaggagctcaaaatggagttgccggagagacagcccaggttcgtggtttacagctacaagtacgtgcgtgacgatggccgagtgtcctaccctttgtgtttcatcttctccagccctgtgggctgcaagccggaacaacagatgatgtatgcagggagtaaaaacaggctggtgcagacagcagagctcacaaaggtgttcgaaatccgcaccactgatgacctcactgaggcctggctccaagaaaagttgtctttctttcgttgatctctgggctggggactgaattcctgatgtctgagtcctcaaggtgactggggacttggaacccctaggacctgaacaaccaagactttaaataaattttaaaatgcaaaaaaaaaaaaaa

SEQ ID NO: 84 - DNA, 771 bp, Homo sapiens
  sig_peptide 48..356: Von Heijne matrix score 4.90000009536743 seq VYAFLGLTAPSGS/KE
  polyA_signal 742..747
  polyA_site 760..771
ccacagcccttttcaggacccaaacaaccgcagccgctgttcccaggatggtgatccgtgtatatattgcatcttcctctggctctacagcgattaagaagaaacaacaagatgtgcttggtttcctagaagccaacaaaataggatttgaagaaaaagatattgcagccaatgaagagaatcggaagtggatgagagaaaatgtacctgagaatagtcgaccagccacaggtaaccccctgccacctcagattttcaatgaaagccagtatcgcggggactatgatgccttctttgaagccagagaaaataatgcagtgtatgccttcttaggcttgacagccccatctggttcaaaggaagcagaagtgcaagcaaagcagcaagcatgaaccttgagcactgtgctttaagcatcctgaaaaatgagtctccattgcttttataaaatagcagaattagctttgcttcaaaagaaataggcttaatgttgaaataatagattagttgggttttcacatgcaaacactcaaaatgaatacaaaattaaaatttgaacattatggtgattatggtgaggagaatgggatattaacataaaattatattaataagtagatatcgtagaaatagtgttgttacctgccaagccatcctgtatacaccaatgattttacaaagaaaacacccttccctccttctgccattactatggcaacctaagtgtatctgcagctctacattaaaaaggagaaagagaaaaaaaaaaaa

SEQ ID NO: 85 - DNA, 959 bp, Homo sapiens
  sig_peptide 69..359: Von Heijne matrix score 4 seq RLPLVVSFIASSS/AN
  polyA_signal 927..932
  polyA_site 947..959
cggagagaaccaggcagcccagaaaccccaggcgtggagattgatcctgcgagagaagggggttcatcatggcggatgacctaaagcgattcttgtataaaaagttaccaagtgttgaagggctccatgccattgttgtgtcagatagagatggagtacctgttattaaagtggcaaatgacaatgctccagagcatgctttgcgacctggtttcttatccacttttgcccttgcaacagaccaaggaagcaaacttggactttccaaaaataaaagtatcatctgttactataacacctaccaggtggttcaatttaatcgtttacctttggtggtgagtttcatagccagcagcagtgccaatacaggactaattgtcagcctagaaaaggaacttgctccattgtttgaagaactgagacaagttgtggaagtttcttaatctgacagtggtttcagtgtgtaccttatcttcattataacaacacaatatcaatccagcaatctttagactacaataatacttttatccatgtgctcaagaaagggcccctttttccaacttatactaaagagctagcatatagatgtaatttatagatagatcagttgctatattttctggtgtagggtctttcttatttagtgagatctagggataccacagaaatggttcagtctatcacagctcccatggagttagtctggtcaccagatatggatgagagattctattcagtggatcagaatcaaactggtacattgatccacttgagccgttaagtgctgccaattgtacaatatgcccaggcttgcagaataaagccaactttttattgtgaataataataaggacatatttttcttcagattatgttttatttctttgcattgagtgaggaacataaaatggcttggtaaaagtaataaaatcagtacaatcactaaaaaaaaaaaa

SEQ ID NO: 86 - DNA, 464 bp, Homo sapiens
  sig_peptide 33..98: Von Heijne matrix score 9.80000019073486 seq LVVFCLALQLVPG/SP
  polyA_signal 437..442
  polyA_site 455..464
gccagaacttactcacccatcccactgacaccatgaagcctgtgctgcctctccagttcctggtggtgttctgcctagcactgcagctggtgcctgggagtcccaagcagcgtgttctgaagtatatcttggaacctccaccctgcatatcagcacctgaaaactgtactcacctgtgtacaatgcaggaagattgcgagaaaggatttcagtgctgttcctccttctgtgggatagtctgttcatcagaaacatttcaaaagcgcaacagaatcaaacacaagggctcagaagtcatcatgcctgccaactgaggcatatttcctagatcattttgcctctacgatgttttttcttggtccacctttaggaaggtattgagaagcaagaaactggaggcccaatatctaacctgcaaatcgtttttgagtttggcaataaaggctaatctaccaaaaaaaaaa

SEQ ID NO: 87 - DNA, 799 bp, Homo sapiens
  sig_peptide 110..235: Von Heijne matrix score 5.19999980926514 seq LLFDLVCHEFCQS/DD
  polyA_signal 764..769
  polyA_site 787..799
ccaaccccaggaagagtctgaagagcagccagtgtttcggcttgtgccctgtatacttgaagctgccaaacaagtacgttctgaaaatccagaatggcttgatgtttacatgcacattttacaactgcttactacagtggatgatggaattcaagcaattgtacattgtcctgacactggaaaagacatttggaatctactttttgacctggtctgccatgaattctgccagtctgatgatccacccatcattcttcaagaacagaaaacagtgctagcctctgttttttcagtgttgtctgccatctatgcctcacagactgagcaagagtatctaaagatagaaaaagtagatcttcctctaattgacagcctcattcgggtcttacaaaatatggaacagtgtcagaaaaaaccagagaactcggcagagtctaacacagaggaaactaaaaggactgatttaacccaagatgatttccacttgaaaatcttaaaggatattttatgtgaatttctttctaatatttttcaggcattaacaaaggagacggtggctcagggagtaaaggaaggccagttgagcaaacagaagtgttcctctgcatttcaaaaccttcttcctttctatagccctgtggtggaagattttattaaaatcctacgtgaagttgataaggcgcttgctgatgacttggaaaaaaacttcccaagtttgaaggttcagacttaaaacctgaattggaattacttctgtacaagaaataaactttatttttctcactgaaaaaaaaaaaaa

SEQ ID NO: 88 - DNA, 320 bp, Homo sapiens
  polyA_site 308..320
tcatcatccagagcagccagtgtccgggaggcagaagatgccccactccaagcctctggactgggggctctcttcagtggctgaatgtccagcagagctatttccttccacagggggccttgcagggaagggtccaggacttgacatcttaagatgcgtcttgtccccttgggccagtcatttcccctctctgagcctcggtgtcttcaacctgtgaaatgggatcataatcactgccttacctccctcacggttgttgtgaggactgagtgtgtggaagtttttcataaactttggatgctagtgtaaaaaaaaaaaaa

SEQ ID NO: 89 - DNA, 331 bp, Homo sapiens
  sig_peptide 129..209: Von Heijne matrix score 4.90000009536743 seq CLLSYIALGAIHA/KI
  polyA_site 318..331
atggaaaccagatggggcaacggggtggttctagtgcagactgtagctgcagctcctctccacctctagcctgctcatttccagctcagaaattctactaatggcgttttttcttcctgaaaaaggaaatgaacagggtccctgctgattctccaaatatgtgtctaatctgtttactgagttacatagcacttggagccatccatgcaaaaatctgtaggagagcattccaggaagagggaagagcaaatgcaaagacgggcgtgagagcttggtgcatacagccatgggccaaataaagtttccttggaatagccaaaaaaaaaaaaaa

SEQ ID NO: 90 - DNA, 1075 bp, Homo sapiens
  sig_peptide 78..359: Von Heijne matrix score 4.19999980926514 seq IILTAVYFALSIS/LH
  polyA_signal 1042..1047
  polyA_site 1063..1075
gtggtagggagcagccaggagcggttttctgggaactgtgggatgtgcccttgggggcccgagaaaacagaaggaagatgctccagaccagtaactacagcctggtgctctctctgcagttcctgctgctgtcctatgacctctttgtcaattccttctcagaactgctccaaaagactcctgtcatccagcttgtgctcttcatcatccaggatattgcagtcctcttcaacatcatcatcattttcctcatgttcttcaacaccttcgtcttccaggctggcctggtcaacctcctattccataagttcaaagggaccatcatcctgacagctgtgtactttgccctcagcatctcccttcatgtctgggtcatgaacttacgctggaaaaactccaacagcttcatatggacagatggacttcaaatgctgtttgtattccagagactagcagcagtgttgtactgctacttctataaacggacagccgtaagactaggcgatcctcacttctaccaggactctttgtggctgcgcaaggagttcatgcaagttcgaaggtgacctcttgtcacactgatggatacttttccttcctgatagaagccacatttgctgctttgcagggagagttggccctatgcatgggcaaacagctggactttccaaggaaggttcagactagctgtgttcagcattcaagaaggaagatcccccctcttgcacaattagagtgtccccatcggtctccagtgcggcatcccttccttgccttctacctctgttccacccccttccttcctctcctctctgtaccattcattctccctgaccggcctttcttgccgagggttctgtggctcttacccttgtgaagcttttcctttagcctgggacagaaggacctcccggcccccaaaggatctcccagtgaccaaaggatgcgaagagtgatagttacgtgctcctgactgatcacaccgcagacatttagatttttatacccaaggcactttaaaaaaatgttttataaatagagaataaattgaattcttgttccaaaaaaaaaaaaa

SEQ ID NO: 91 - DNA, 632 bp, Homo sapiens
  sig_peptide 62..265: Von Heijne matrix score 4.59999990463257 seq LPFSLVSMLVTQG/LV
  polyA_signal 602..607
  polyA_site 621..632
cactgggtcaaggagtaagcagaggataaacaactggaaggagagcaagcacaaagtcatcatggcttcagcgtctgctcgtggaaaccaagataaagatgcccattttccaccaccaagcaagcagagcctgttgttttgtccaaaatcaaaactgcacatccacagagcagagatctcaaagattatgcgagaatgtcaggaagaaagtttctggaagagagctctgcctttttctcttgtaagcatgcttgtcacccagggactagtctaccaaggttatttggcagctaattctagatttggatcattgcccaaagttgcacttgctggtctcttgggatttggccttggaaaggtatcatacataggagtatgccagagtaaattccatttttttgaagatcagctccgtggggctggttttggtccacagcataacaggcactgcctccttacctgtgaggaatgcaaaataaagcatggattaagtgagaagggagactctcagccttcagcttcctaaattctgtgtctgtgactttcgaagttttttaaacctctgaatttgtacacatttaaaatttcaagtgtactttaaaataaaatacttctaatgtaaaaaaaaaaaa

SEQ ID NO: 92 - DNA, 430 bp, Homo sapiens
  polyA_signal 402..407
  polyA_site 419..430
gtattgggaaagtgatttgtgaaatgaaagtagaagaagagcataccaatgcaataggcactctccacggcggtttgacagccacgttagtagataacatatcaacaatggctctgctatgcacggaaaggggagcacccggagtcagtgtcgatatgaacataacgtacatgtcacctgcaaaattaggagaggatatagtgattacagcacatgttctgaagcaaggaaaaacacttgcatttacctctgtgggtctgaccaacaaggccacaggaaaattaatagcacaaggaagacacacaaaacacctgggaaactgagagaacagcagaatgacctaaagaaacccaacaatgaatatcaagtatagatttgactcaaacaattgtaatttttgaaataaactagcaaaaccaaaaaaaaaaaa

SEQ ID NO: 93 - DNA, 185 bp, Homo sapiens
  sig_peptide 42..113: Von Heijne matrix score 3.70000004768372 seq ILFNLLIFLCGFT/NY
  polyA_site 172..185
ctttcagaactcactgccaagagccctgaacaggagccaccatgcagtgcttcagcttcattaagaccatgatgatcctcttcaatttgctcatctttctgtgtggcttcaccaactatacggattttgaggactcaccctacttcaaaatgcataaacctgttacaatgtaaaaaaaaaaaaaa

SEQ ID NO: 94 - DNA, 585 bp, Homo sapiens
  sig_peptide 108..170: Von Heijne matrix score 5.5 seq SFLPSALVIWTSA/AF
  polyA_signal 550..555
  polyA_site 574..585
cacgttcctgttgagtacacgttcctgttgatttacaaaaggtgcaggtatgagcaggtctgaagactaacattttgtgaagttgtaaaacagaaaacctgttagaaatgtggtggtttcagcaaggcctcagtttccttccttcagcccttgtaatttggacatctgctgctttcatattttcatacattactgcagtaacactccaccatatagacccggctttaccttatatcagtgacactggtacagtagctccagaaaaatgcttatttggggcaatgctaaatattgcggcagtcttatgtcaaaaatagaaatcaggaagataattcaacttaaagaagttcatttcatgaccaaactcttcagaaacatgtctttacaagcatatctcttgtattgctttctacactgttgaattgtctggcaatatttctgcagtggaaaatttgatttagctagttcttgactgataaatatggtaaggtgggcttttccccctgtgtaattggctactatgtcttactgagccaagttgtaatttgaaataaaatgatatgagagtgacacaaaaaaaaaaaa

SEQ ID NO: 95 - DNA, 613 bp, Homo sapiens
  sig_peptide 118..171: Von Heijne matrix score 5.90000009536743 seq ALALLWSLPASDL/GR
  polyA_signal 583..588
  polyA_site 602..613
ggggtgggtggactagaagcatttgggagtagtggccaggggccctggacgctagccacggagctgccgcacagagcctggtgtccacaagcttccaggttggggttggagcctgggatgagccccggcagcgccttggcccttctgtggtccctgccagcctctgacctgggccggtcagtcattgctggactctggccacacactggcgttctcatccacttggaaacaagccagtcttttctgcaaggtcagttgaccaagagcatatttcccctctgttgtacatcgttgttttgtgtttgtgttgtaacagtgggtggagggagggtggggtctacatttgttgcatgagtcgatgggtcagaactttagtatacgcatgcgtcctctgagtgacagggcattttgtcgaaaataagcaccttggtaactaaacccctctaatagctataaaggctttagttctgtattgattaagttactgtaaaagcttgggtttatttttgtaggacttaatggctaagaattagaacatagcaagggggctcctctgttggagtaatgtaaattgtaattataaataaacatgcaaacctttaaaaaaaaaaaa

SEQ ID NO: 96 - DNA, 427 bp, Homo sapiens
  sig_peptide 128..268: Von Heijne matrix score 5.5 seq SALLFFARPCVFC/FK
  polyA_signal 410..415
  polyA_site 424..427
agcttggatttacactgggcaacgtggttggaatgtatctggctcagaactatgatataccaaacctggctaaaaaacttgaagaaattaaaaaggacttggatgccaagaagaaaccccctagtgcatgagactgcctccagcactgccttcaggatatactgattctactgctcttgagggcctcgtttactatctgaaccaaaagcttttgttttcgtctccagcctcagcacttctcttctttgctagaccctgtgttttttgctttaaagcaagcaaaatggggccccaatttgagaactacccaacatttccaacatactcacctcttcccataatccctttccaactgcatgggaggttctaagactggaattatggtgctagattagtaaacatgacttttaatgaaaaaaaaacaaaa

SEQ ID NO: 97 - DNA, 905 bp, Homo sapiens
  sig_peptide 149..457: Von Heijne matrix score 4.90000009536743 seq FLLAQTTLRNVLG/TQ
  polyA_site 893..912
gctgcctgttcttcacacttagctccaaacccatgaaaaattgccaagtataaaagcttctcaagaatgagatggattctagggtgtcttcacctgagaagcaagataaagagaatttcgtgggtgtcaacaataaacggcttggtgtatgtggctggatcctgttttccctctctttcctgttggtgatcattaccttccccatctccatatggatgtgcttgaaggtttgatcctggtcctgccatgcatagatgtgtttgtcaaagttgacctccgaacagttacttgcaacattcctccacaagagatcctcaccagagactccgtaactactcaggtagatggagttgtctattacagaatctatagtgctgtctcagcagtggctaatgtcaacgatgtccatcaagcaacatttctgctggctcaaaccactctgagaaatgtcttagggacacagaccttgtcccagatcttagctggacgagaagagatcgcccatagcatccagactttacttgatgatgccaccgaactgtgggggatccgggtggcccgagtggaaatcaaagatgttcggattcccgtgcagttgcagagatccatggcagccgaggctgaggccacccgggaagcgagagccaaggtccttgcagctgaaggagaaatgaatgcttccaaatccctgaagtcagcctccatggtgctggctgagtctcccatagctctccagctgcgctacctgcagaccttgagcacggtagccaccgagaagaattctacgattgtgtttcctctgcccatgaatatactagagggcattggtggcgtcagctatgataaccacaagaagcttccaaataaagcctgaggtcctcttgcggtagtcaaaaaaaaaaaaa

SEQ ID NO: 98 - DNA, 560 bp, Homo sapiens
  CDS (11)..(439)
  polyA_site (547)..(560)
  polyA_signal (530)..(535)
cagaacaatcatgtctgactccctggtggtgtgcgaggtagacccagagctaacagaaaagctgaggaaattccgcttccgaaaagagacagacaatgcagccatcataatgaaggtggacaaagaccggcagatggtggtgctggaggaagaatttcggaacatttccccagaggagctcaaaatggagttgccggagagacagcccaggttcgtggtttacagctacaagtacgtgcgtgacgatggccgagtgtcctaccctttgtgtttcatcttctccagccctgtgggctgcaagccggaacaacagatgatgtatgcagggagtaaaaacaggctggtgcagacagcagagctcacaaaggtgttcgaaatccgcaccactgatgacctcactgaggcctggctccaagaaaagttgtctttctttcgttgatctctgggctggggactgaattcctgatgtctgagtcctcaaggtgactggggacttggaacccctaggacctgaacaaccaagactttaaataaattttaaaatgcaaaaaaaaaaaaaa

SEQ ID NO: 99 - DNA, 568 bp, Homo sapiens
  CDS 7..471
  sig_peptide 7..99: Von Heijne matrix score 6.9 seq LLLVPSALSLLLA/LL
  polyA_signal 537..542
  polyA_site 554..568
gggaccatgttcaccagcaccggctccagtgggctctacaaggcgcctctgtcgaagagccttctgctggtccccagtgccctctccctcctgctcgccctcctcctgcctcactgccagaagccctttgtgtatgaccttcacgcagtcaagaacgacttccagatttggaggttgatatgtggaagaataatttgccttgatttgaaagatactttctgcagtagtctgcttatttataattttaggatatttgaaagaagatatggaagcagaaaatttgcatcctttttgctgggtacctgggttttgtcagccttatttgactttctcctcattgaagctatgcagtatttctttggcatcactgcagctagtaatttgccttctggattaatcttttgttgtgctttttgctctgagactaaactcttcttatcaagacaagctatggcagagaacttttccatctaataaatttaagagtagattcatctgtatggttgagagtaggctctgactatgtatatgtgtataataaacctacatatccaaaaaaaaaaaaaaa

SEQ ID NO: 100 - DNA, 569 bp, Homo sapiens
  CDS 168..332
  polyA_signal 557..562
agggggcgtggggccatggtggtcttgcgggcggggaagaagacctttctcccccctctctgccgcgccttcgcctgccgcggctgtcaactcgctccggagcgcggcgccgagcgcagggatacggcgcccagcggggtcagaaagcaacattgaatgcagaagaaatggcggacttctacaaggaatttttaagtaaaaattttcagaagcgcatgtattataacagagattggtacaagcgcaattttgccatcaccttcttcatgggaaaagtggccctggaaaggatttggaacaagcttaaacagaaacaaaagaagaggagcaactaggagtccactctgacccagccagagtccaggtttccacaggaagcagatggagctcctttcacaggggctctgagaaaaactggagccgatctcaagaagccccacatcttcctaaggggccccatggcctgtttgggggcagggtaggtcctggggcactgtgggccgcctgcctgctgatgtgggctctaggccagcttgttgtcacgtacgtggtgtgaaataaagcccaag

SEQ ID NO: 101 - DNA, 895 bp, Homo sapiens
  CDS 51..251
  sig_peptide 51..110: Von Heijne matrix score 5.3 seq ALIFGGFISLIGA/AF
  polyA_signal 849..854
  polyA_site 882..895
ccgagagtgccgggcggtcggcgggtcagggcagcccggggcctgacgccatgtcccggaacctgcgcaccgcgctcattttcggcggcttcatctccctgatcggcgccgccttctatcccatctacttccggcccctaatgagattggaggagtacaagaaggaacaagctataaatcgggctggaattgttcaagaggatgtgcagccaccagggttaaaagtgtggtctgatccatttggcaggaaatgagagggctgtcatcagctctgattaagaaaggagatttcttcatgctttcgattctgcatggggtacagccagtcacctcaccagagaatgacggctggagaagaaaactctgtaataccataaataagagtgcttgtaataaaagactgtgcacaaggattaatatttcccttcttaagtatcaaaagaactctggaacaaattataccattaggaaggttttcatgattcagttgattttccaaaaatgaagctatctcacccagctgggtttggaggagcaatctgcttattattctgtcgttaccacttactcaagcgagctgtgatatgaatacaagcaaccagtgggctcgggaaggtccgggtctcttctgccatcttccagataagagatttcagtaaaaaactgccatgctgagctgccttatagagctcttcgaaaatgttcgagttgataaagctctttgaggacaaggtacttcgtgcacctcatgctgaagattgcaccatgttggaagataaatatgaagcaagtcaaactagatgcatacacttgtgtagaaatcaataatcaattaatagaagtgaaaaaatagacattaagatgatttatttccactttgcaaaaaaaaaaaaaa

SEQ ID NO: 102 - DNA, 691 bp, Homo sapiens
  CDS 20..613
  sig_peptide 20..82: Von Heijne matrix score 10 seq LWALAMVTRPASA/AP
ataccttagaccctcagtcatgccagtgcctgctctgtgcctgctctgggccctggcaatggtgacccggcctgcctcagcggcccccatgggcggcccagaactggcacagcatgaggagctgaccctgctcttccatgggaccctgcagctgggccaggccctcaacggtgtgtacaggaccacggagggatggctgacaaaggccaggaacagcctgggtctctatggccgcacaatagaactcctggggcaggaggtcagccggggccgggatgcagcccaggaacttcgggcaagcctgttggagactcagatggaggaggatattctgcagctgcaggcagaggccacagctgaggtgctgggggaggtggcccaggcacagaaggtgctacgggacagcgtgcagcggctagaagtccagctgaggagcgcctggctgggccctgcctaccgagaatttgaggtcttaaaggctcacgctgacaagcagagccacatcctatgggccctcacaggccacgtgcagcggcagaggcgggagatggtggcacagcagcatcggctgcgacagatccaggagagactccacacagcggcgctcccagcctgaatctgcctggatggaactgaggaccaatcatgctgcaaggaacacttccacgccccgtgaggcccctgtgcaggg

SEQ ID NO: 103 - DNA, 458 bp, Homo sapiens
  CDS 12..416
  sig_peptide 12..86: Von Heijne matrix score 4 seq LVVMVPLVGLIHL/GW
  polyA_signal 425..430
  polyA_site 445..458
gctgaagtactatgagccttcggaacttgtggagagactacaaagttttggttgttatggtccctttagttgggctcatacatttggggtggtacagaatcaaaagcagccctgttttccaaatacctaaaaacgacgacattcctgagcaagatagtctgggactttcaaatcttcagaagagccaaatccaggggaagntagcaggcttgcaatcttcaggtaaagaagcagctttgaatctgagcttcatatcgaaagaagagatgaaaaataccagttggattagaaagaactggcttcttgtagctgggatatctttcataggtgaccatcttggaacatactttttgcagaggtctgcaaagcagtctgtaaaatttcagtctcaaagcaaacaaaagagtattgaagagtgaagtaaaataaatatttggaattactaaaaaaaaaaaaaa

SEQ ID NO: 104 - DNA, 2036 bp, Homo sapiens
  CDS 276..1040
  sig_peptide 276..485: Von Heijne matrix score 3.9 seq SVIGVMLAPFTAG/LS
  polyA_site 2024..2036
gatcctgggtgcagctcatcacaagcgtcggggtgcagcaaaaccatccaggctggacagtggctggacagttccaagaaaagaaacgcttcaccgaagaagtcattgaatacttccagaagaaagttagcccagtgcatctgaaaatcctgctgactagcgatgaagcctggaagagattcgtgcgtgtggctggattgcccagggaagaagcagatgctctctatgaagctctgaagaatcttacaccatatgtggctattgaggacaaagacatgcagcaaaaagaacagcagtttagggagtggtttttgaaagagtttcctcaaatcagatggaagattcaggagtccatagaaaggcttcgtgtcattgcaaatgagattgaaaaggtccacagaggctgcgtcatcgccaatgtggtgtctggctccactggcatcctgtctgtcattggcgttatgttggcaccatttacagcagggctgagcctgagcattactgcagctggggtagggctgggaatagcatctgccacggctgggatcgcctccagcatcgtggagaacacatacacaaggtcagcagaactcacagccagcaggctgactgcaaccagcactgaccaattggaggcattaagggacattctgcatgacatcacacccaatgtgctttcctttgcacttgattttgacgaagccacaaaaatgattgcgaatgatgtccatacactcaggagatctaaagccactgttggacgccctttgattgcttggcgatatgtacctataaatgttgttgagacactgagaacacgtggggcccccacccggatagtgagaaaagtagcccggaacctgggcaaggccacttcaggtgtcctcgttgtgctggatgtagtcaaccttgtgcaagactcactggacttgcacaagggggaaaaatccgagtctgctgagttgctgaggcagtgggctcaggagctggaggagaatctcaatgagctcacccatatccatcagagtctaaaagcaggctaggcccaattgttgcgggaagtcagggaccccaaacggagggactggctgaagccatggcagaagaacgtggattgtgaagatttcatggacatttattagttccccaaattaatacttttataatttcctatgcctgtctttaccgcaatctctaaacacaaattgtgaagatttcatggacacttatcacttccccaatcaatacccttgtgatttcttatgcctgtctttactttaatctcctaatcctgtcagctgaggagggtgtatgtcacctcaggaccatgtgataattgcgttaactgcacaaattgtagagcatgtgtgtttgaacaatatgaaatctgggcaccttgaaaaaagaacaggataacagcaatcgttcaggggataagagagataaccttaaactctgaccaacagtgagccgggtggagcagagtcatatttcttttctttcaaaagcaaatgggagaaatatcgctgaattctttttctcagcaaggaacatccctgagaaagagaatgcacccctgagggtgggtctataaatggcctccttgggtgtggccatcttctatggtcgagactgtagggatgaaataaaccccagtctcccatagtgctcccaggcttattaggaagaggaaattcccgcctaataaattttggtcagaccggttgctctcaaaaccctgtctcctgataagatgttatcaatgacaatggtgcctgaaacctcattagcaattttaatttctccccggtcctgtggtcctgtgatctcaccctgcctccacttgccttgtgatattctattaccttgtgaagtaggtgatctttgtgacccacaccctattcatacactccctccccttttggaagtccctaataaaaacttgctggttttgcagcttgtgaggcatcacggaacctactgatgtgtgatgtctcccctggacacctagctttaaaatttcaaaaaaaaaaaaa

SEQ ID NO: 105 - DNA, 1276 bp, Homo sapiens
  CDS 443..619
  sig_peptide 443..589: Von Heijne matrix score 7 seq LICVVCLYIVCRC/GS
  polyA_site 1267..1276
gaggcactcacggcatttcattgctactttaattttcattattatgggattgattgctgtcacagctactgctgcagtagctggagttgctttgcattccacagtacaaacagcagactatgtaaataattggtagaaaaattctactctgctgtggaattaccaagataatatagaccagaaactagctgatcaaattaatgatctccaacaaactgtaatgtggctaggggatcatatagttagtttagaatatagaatgcggttacaatgtgattgaaatacctctgatttttgcattactcctcatctgtgtaatgaaacagagcatgagtgggaaaaagttaagagatatttaaaaggtcatactagaaatttatctttggatattgcaaagctaaaggaacaagtatttcaagcccctcagatacatctgacactaatgccaggaactgaagtgcttgaaggagctacagacggattagcagctattaacctgctaaaatggatcaagacacttggaggctctgtgatttcaatgattgtgcttttaatctgtgttgtttgtctttatatagtctgtagatgcggaagccacctctggagagaaagccaccactgagagcaagcaatgatagctgtggcggttttgcaaaaagaaaagggagacaagcgcccagctatagttaccaataaagcatggtactggtattaaaataggcatgtgttctgttccaatggaacagaatagagaacccagaaacaaagccaaatatttacagccaactgatctctgacaaagcaaacaaaaacataaagtggggaaaggacaccctattccacaaatagtgcagggataattggcaagccacatgtagaaaaatgaagctggatcctcgtctctcactttatacaaaaatcaactcaaaatgggtcaaagtcttaactctaagacctgaaaccataacaattctagaaaataacattggaaaaactcttctagacattggtttaggcaaaaagttcatgaccaagaacccaaaagcaaatgcaataaaaaggaagataaatagatgggacctaattaagctgaaaagcttctgcatagcaaaaggaataatcagcagagcaaacagacaacccacagggtgggagaaaatatttgcaagctatgtatctgacaatggactaatatccagaatctacaaggaattcaaacaattagcaagaaaaaacacttgtattgtgtttgctctgtaaatcagcaaaaaaaaaa

SEQ ID NO: 106 - DNA, 747 bp, Homo sapiens
  CDS 206..745
accagaagcaggtgatttccgagctcagcaatgctcagctcataatgatgtcaagcaccatggccagttttatgaatggcttcctgtgtctaatgaccctgacaacccatgttcactcaagtgccaagccaaaggaacaaccctggttgttgaactagcacctaaggtcttagatggtacgcgttgctatacagaatctttggatatgtgcatcagtggtttatgccaaattgttggctgcgatcaccagctgggaagcaccgtcaaggaagataactgtggggtctgcaacggagatgggtccacctgccggctggtccgagggcagtataaatcccagctctccgcaaccaaatcggatgatactgtggttgcaattccctatggaagtagacatattcgccttgtcttaaaaggtcctgatcacttatatctggaaaccaaaaccctccaggggactaaaggtgaaaacagtctcagctccacaggaactttccttgtggacaattctagtgtggacttccagaaatttccagacaaagagatactgagaatggctggaccactcacagcagatttcattgtcaagattcgtaactcgggctccgctgacagtacagtccagttcatcttctatcaacccatcatccaccgatggagggagacggatttctttccttgctcagcaacctgtggaggaggttatcagctgacatcggctgagtgctacgatctgaggagcaaccg

SEQ ID NO: 107 - DNA, 561 bp, Homo sapiens
  CDS 36..521
  sig_peptide 36..104: Von Heijne matrix score 7.4 seq VLLLAALPPVLLP/GA
  polyA_signal 528..533
  polyA_site 548..561
gacgcctctttcagcccgggatcgccccagcagggatgggcgacaagatctggctgcccttccccgtgctccttctggccgctctgcctccggtgctgctgcctggggcggccggcttcacaccttccctcgatagcgacttcacctttacccttcccgccggccagaaggagtgcttctaccagcccatgcccctgaaggcctcgctggagatcgagtaccaagttttagatggagcaggattagatattgatttccatcttgcctctccagaaggcaaaaccttagtttttgaacaaagaaaatcagatggagttcacactgtagagactgaagttggtgattacatgttctgctttgacaatacattcagcaccatttctgagaaggtgattttctttgaattaatcccggataatatgggagaacaggcacaagaacaagaagattggaagaaatatattactggcacagatatattggatatgaaactggaagacatcctggtcagtatggtcttctaataaaataaaaattattaacagccaaaaaaaaaaaaaa

SEQ ID NO: 108 - DNA, 632 bp, Homo sapiens
  CDS 36..395
  sig_peptide 36..104: Von Heijne matrix score 7.4 seq VLLLAALPPVLLP/GA
  polyA_signal 599..604
  polyA_site 619..632
gacgcctctttcagcccgggatcgccccagcagggatgggcgacaagatctggctgcccttccccgtgctccttctggccgctctgcctccggtgctgctgcctggggcggccggcttcacaccttccctcgatagcgacttcacctttacccttcccgccggccagaaggagtgcttctaccagcccatgcccctgaaggcctcgctggagatcgagtaccaagttttagatggagcaggattagatattgatttccatcttgcctctccagaaggcaaaaccttagtttttgaacaaagaaaatcagatggagttcacacgtgtataagaagtaaaaatgggccaggcactgcggttcacgcctataatcccagcactttccgaggccaagtgtagagactgaagttggtgattacatgttctgctttgacaatacattcagcaccatttctgagaaggtgattttctttgaattaatcctggataatatgggagaacaggcacaaggacaagaagattggaagaaatatattactggcacagatatattggatatgaaactggaagacatcctggtcagtatggtcttctaataaaataaaaattattaacagccaaaaaaaaaaaaaa

SEQ ID NO: 109 - DNA, 370 bp, Homo sapiens
  CDS 21..41
  polyA_signal 328..333
  polyA_site 357..370
ctgggacttctggcctcacaatggttgagatgactggggtgtagcagtgccaagtcgaggctgtgaaaggccttccacctttactctcgtgctcgtgccctcccccattgttaggagaagggcatgctcaggccagcccattagcccaggaggaggacaagaaacacacggagcagacacaagccacctcaccaacccagccaaggctgtcctgaattagcaaccctgacacgtgtgagcaagtccaacggacaccggaagatccacctagtcaagcccaaccaagactggcagagctgccaagctgaccacttaaggcgcatgaggaataaacactcgttgctgcatgccattgcaaaaaaaaaaaaaa

SEQ ID NO: 110 - DNA, 994 bp, Homo sapiens
  CDS 35..631
  sig_peptide 35..160: Von Heijne matrix score 8.6 seq ASLFLLLSLTVFS/IV
  polyA_signal 901..906
  polyA_site 979..994
ataattggagctgcaaagcagatcgtgacaagagatggacggtcagaagaaaaattggaaggacaaggttgttgacctcctgtactggagagacattaagaagactggagtggtgtttggtgccagcctattcctgctgctttcattgacagtattcagcattgtgagcgtaacagcctacattgccttggccctgctctctgtgaccatcagctttaggatatacaagggtgtgatccaagctatccagaaatcagatgaaggccacccattcagggcatatctggaatctgaagttgctatatctgaggagttggttcagaagtacagtaattctgctcttggtcatgtgaactgcacgataaaggaactcaggcgcctcttcttagttgatgatttagttgattctctgaagtttgcagtgttgatgtgggtatttacctatgttggtgccttgtttaatggtctgacactactgattttggctctcatttcactcttcagtgttcctgttatttatgaacggcatcaggcacagatagatcattatctagtacttgcaaataagaatgttaaagatgctatggctaaaatccaagcaaaaatccctggattgaagcgcaaagctgaatgaaaacgcccaaaataattagtaggagttcatctttaaaggggatattcatttgattatacgggggagggtcagggaagaacgaaccttgacgttgcagtgcagtttcacagatcgttgttagatctttatttttagccatgcactgttgtgaggaaaaattacctgtcttgactgccatgtgttcatcatcttaagtattgtaagctgctatgtatggatttaaaccgtaatcatatctttttcctatctatctgaggcactggtggaataaaaaacctgtatattttactttgttgcagatagtcttgccgcatcttggcaagttgcagagatggtggagctagaaaaaaaaaaaacaaa

SEQ ID NO: 111 - DNA, 412 bp, Homo sapiens
  CDS 271..399
gccgctagcgcctcgagcgatgcacctcctttccaactgggcaaaccccgcttccagcagacgtccttctatggccgcttcaggcacttcttggatatcatcgaccctcgcacactctttgtcactgagagacgtctcagagaggctgtgcagctgctggaggactataagcatgggaccctgcgcccgggggtcaccaatgaacagctctggagtgcacagaaaatcaagcaggctattctacatccggacaccaatgagaagatcttcatgccatttagaatgtcaggttatattccttttgggacgccaattgtaagtgttaccttcaaaggatttccttttctaaaaaattattttaaatgtctaactttatgttattgctcacgggtatttgactgaattgttgatt

SEQ ID NO: 112 - DNA, 597 bp, Homo sapiens
  CDS 103..252
  sig_peptide 103..213: Von Heijne matrix score 3.9 seq PGPSLRLFSGSQA/SV
  polyA_site 588..597
gaaaggtcagaggaaggagctgtgggaagctcgcagcaggtatcggagcttaagccagtggatttgggggccctgggctccctagccggctgcggtgtgagaatggagtgggcaggaaagcagcgggactttcaggtaagggcagctccgggctgggatcatttggcctcctttcctggcccttctctccggctgttttctgggagtcaggcgagtgtctgtagtctctgctcggggtttggggctcaggaatgatgtcatgctccaacagttggattctattagcttaaggaggagggaaacagccaattttcttgactttgcaaatctagctgatctcactcttgctgaatctgaggtgtttagacttcactctaaaaagcatcattttacttttatttagcacaaaggcacaggatatttttacaggaagaatcttttatatggaaaaatctgagttaacatcactcccgtggtgtttgtagttcttacagggaaactccagtgccttttgagccgcttgttcgtcctagtgaacactgtctgttttgtctcttggtgctgctatgtctgacctgtaatgggagaaaaaaagaa

SEQ ID NO: 113 - DNA, 748 bp, Homo sapiens
  CDS 2..460
  polyA_signal 713..718
  polyA_site 735..748
cacagttcctctcctcctagagcctgccgaccatgcccgcgggcgtgcccatgtccacctacctgaaaatgttcgcagccagtctcctggccatgtgcgcaggggcagaagtggtgcacaggtactaccgaccggacctgatgagaaacaggttgagaagagtgaagttgatttctcaaagtcacatagcttagtgagacgatttgaggatctgaagcccaagctttctgtttgcaaaactggatcacaagtctttcggtcggagaactggaaggtctgggcagagtcgagcagaggagaccatgatgactgcctagacttgtgctcagtgctgtgttggggagaactgctacggacaatacctgaaattccaccaaagcgtggagaactcaaaacggagcttttgggactgaaagaaagaaaacacaaacctcaagtttctcaacaggaggaacttaaataactatgccaagaattctgtgaataatataagtcttaaatatgtatttcttaatttattgcatcaaactacttgtccttaagcacttagtctaatgctaactgcaagaggaggtgctcagtggatgtttagccgatacgttgaaatttaattacggtttgattgatatttcttgaaaaccgccaaagcacatatcatcaaaccatttcatgaatatggtttggaagatgtttagtcttgaatataatgcgaaatagaatatttgtaagtctaccaaaaaaaaaaaaa

SEQ ID NO: 114 - DNA, 703 bp, Homo sapiens
  CDS 31..231
  polyA_signal 769..774
  polyA_site 690..703
ctctggtggctctgctacggcggcgcagaaatgaggcagaagcggaaaggagatctcagccctgctaagctgatgatgctgactataggagatgttattaaacaactgattgaagcccacgagcaggggaaagacatcgatctaaataaggtgagaaccaagacagctgccaaatatggcctttctgcccagccccgcctggtggatatcattgctgccgtccctcctgagtagctgggattacaggcacccgccgctgccaatttttgtatttttagtagggatgggggtttcaccatattggtcaggctggtctcgaactcctgacctcaggtgatcaacccaccttggcctccctaaatgccgggattacaggcatgagccaccgctccgggcctttgattttttaaggtggattttggttgttataaatggagaaaggtaagagttcaagttcaacccgtgtgtgaaagcaaaacaatggaaaacaggattggcttcttcaaaggctcctcttgtagaactgcctctttgaaatttcgaggtaatctactttggagactctgcctggagagggtcagttcctaagttaaaagcatcgcttaaccttggctcctgtggcattttacaaaggtttaaaggaattgattcctctgaaagggcctgaaaataaaaagtctttaacatacaaaaaaaaaaaaaa

SEQ ID NO: 115 - DNA, 725 bp, Homo sapiens
  CDS 305..565
  polyA_signal 694..699
  polyA_site 713..725
ctcacggtggtgaaggtcacagggttgcagcactcccagtagaccaggagctccgggaggcagggccggccccacgtcctctgcgcaccaccctgagttggatcctctgtgcgccacccctgagttggatccagggctagctgctgttgacctccccactcccacgctgccctcctgcctgcagccatgacgcccctgctcaccctgatcctggtggtcctcatgggcttacctctggcccaggccttggactgccacgtgtgaggactacaaatccctccaggatatcattgccatcctgggtatggatgaactttctgaggaagacaagttgaccgtgtcccgtgcacggaaaatacagcgtttcttgtctcagccattccaggttgctgaggtcttcacaggtcatatggggaagctggtacccctgaaggagaccatcaaaggattccagcagattttggcaggtgaatatgaccatctcccagaacaggccttctatatggtgggacccattgaagaagctgtggcaaaagctgataagctggctgaagagcattcatcgtgaggggtctttgtcctctgtactgtctctctccttgcccctaacccaaaaagcttcatttttctgtgtaggctgcacaagagccttgattgaagatatattctttctgaacagtatttaaggtttccaataaagtgtacacccctcaaaaaaaaaaaaa

SEQ ID NO: 116 - DNA, 1705 bp, Homo sapiens
  CDS 124..873
  sig_peptide 124..378: Von Heijne matrix score 3.6 seq HLSVVTLAAKVKC/IP
  polyA_signal 1673..1678
  polyA_site 1694..1705
cggaggtgaggagcggcggccccgcccggtgcgctggaggtcgaagcttccaggtagcggcccgcagagcctgacccaggctctggacatcctgagcccaagtcccccacactcagtgcagtgatgagtgcggaagtgaaggtgacagggcagaaccaggagcaatttctgctcctagccaagtcggccaagggggcagcgctggccacactcatccatcaggtgctggaggcccctggtgtctacgtgtttggagaactgctggacatgcccaatgttagagagctgnaagcccggaatcttcctccactaacagaggctcagaagaataagcttcgacacctctcagttgtcaccctggctgctaaagtaaagtgtatcccatatgcagtgttgctggaggctcttgccctgcgtaatgtgcggcagctggaagaccttgtgattgaggctgtgtatgctgacgtgcttcgtggctccctggaccagcgcaaccagcggctcgaggttgactacagcatcgggcgggacatccagcgccaggacctcagtgccattgcccgaaccctgcaggaatggtgtgtgggctgtgaggtcgtgctgtcaggcattgaggagcaggtgagccgtgccaaccaacacaaggagcagcagctgggcctgaagcagcagattgagagtgaggttgccaaccttaaaaaaaccattaaagttacgacggcagcagcagccgcagccacatctcaggaccctgagcaacacctgactgagctgagggaaccagctcctggcaccaaccagcgccagcccagcaagaaagcctcaaagggcaaggggctccgagggagcgccaagatttggtccaagtcgaattgaaagaactgtcgtttcctccctggggatgtggggtcccagctgcctgcctgcctcttaggagtcctcagagagccttctgtgcccctggccagctgataatcctaggttcatgacccttcacctcccctaaccccaaacatagatcacaccttctctagggaggagtcaaatgtaggtcatgtttttgttggtactttctgttttttgtgacttcatgtgttccattgctccccgctgccatgctctctcccttgtttccttaagagctcagcatctgtccctgttcattacatgtcattgagtaggtgggtagccctgatgggggtcgctctgtctggagcataacccacaggcgttttttctgccaccccatccctgcatgcctgatccccagttcctataccctacccctgacctattgagcagcctctgaagagccatagggcccccacctttactcacaccctgagaattctgggagccagtctgccatgccaggagtcactggacatgttcatcctagaatcctgtcacactacagtcatttcttttcctctctctggcccttgggtcctgggaatgctgctgcttcaaccccagagcctaagaatggcagccgtttcttaacatgttgagagatgattctttcttggccctggccatctcgggaagcttgatggcaatcctggaagggtttaatctccttttgtgagtttggtggggaagggaagggtatatagattatattaaaaaaaaaaaggtatatatgcatatatctatatataatatgacgcagaaataaatctatgagaaatccaaaaaaaaaaaa

SEQ ID NO: 117 - DNA, 1069 bp, Homo sapiens
  CDS 135..206
  polyA_signal 850..855
  polyA_site 1056..1069
cccactccgctctcacgactaagctctcacgattaaggcacgcctgcctcgattgtccagcctctgccagaagaaagcttagcagccagcgcctcagtagagacctaagggcgctgaatgagtgggaaagggaaatgccgaccaattgcgctgcggcgggctgtgccactacctacaacaagcacattaacatcagcttccacaggtaacctgggcagggagtgggggtgacggaaactggagttcctattgtggctatcgcttgtgtggaaggaacaggaggattctgctaattctaataactttcccagctggtagcagggaagcatcgtatgtcctttgtgtttctcaaatctgcccaattgttctctgctttcggggaagctttactcattttctaaaagaaatccaagtactgtttggtcattaccccttagtaaaaaaaagtaacaggaggatatcgtaattttctactgttttattcctctgttagaccgggccttgacatgaatgacgccgtaagggagaaagagatcttcccaatcagcaatcaccgtaaaagcctgctgtgttcccgttaaaattaggaaattctcactagatgaattgacatgggaggcatttagatttctaatagtcacatagtaattctgcggaggaattgagtcatctttgatagccatggaattaagcgatgttaattaaagtgcaaacgataacctttctgttcttactagaatagagtaataaaaagaacctaggttttcttttgtttgctggaagaaaaatcaaaattctttagttctgtcaaaccagaactcttgaaagcactttgaacaatgcctggaaaataacaggtactctgtaaatgtttaccttctctgcaagtgcctgccacgtgcccgaagaaaagacacattaaaaagttaagtgacaccagtcctgattttatatattttatatacctaacaacgtatatgttagtatgtagaaattatatccttgacctttttccctacctattacgaactgtacttttattaaaagctgccactaaaaaaaaaaaaaa

SEQ ID NO: 118 - DNA, 1084 bp, Homo sapiens
  CDS 135..818
  polyA_signal 909..914
  polyA_site 1071..1084
cccactccgctctcacgactaagctctcacgattaaggcacgcctgcctcgattgtccagcctctgccagaagaaagcttagcagccagcgcctcagtagaggcctaagggcgctgaatgagtgggaaagggaaatgccgaccaattgcgctgcggcgggctgtgccactacctacaacaagcacattaacatcagcttccacaggtttcctttggatcctaaaagaagaaaagaatgggttcgcctggttaggcgcaaaaattttgtgccaggaaaacacacttttctttgttcaaagcactttgaagcctcctgttttgacctaacaggacaaactcgacgacttaaaatggatgctgttccaaccatttttgatttttgtacccatataaagtctatgaaactcaagtcaaggaatcttttgaagaaaaacaacagttgttctccagctggaccatctagtttaaaatcaaacattagtagtcagcaagtactacttgaacacagctatgcctttaggaatcctatggaggcaaaaaagaggatcattaaactggaaaaagaaatagcaagcttaagaagaaaaatgaaaacttgcctacaaaaggaacgcagagcaactcgaagatggatcaaagccatgtgtttggtaaagaatttagaagcaaatagtgtattacctaaaggtacatcagaacacatgttaccaactgccttaagcagtcttcctttggaagattttaagatccttgaacaagatcaacaagataaaacactgctaagtctaaatctaaaacagaccaagagtaccttcatttaaatttagcttgcacagagcttgatgcctatccttcattcttttcagaagtaaagataattatggcacttatgccaaaattcattatttaataaagttttacttgaagtaacattactgaatttgtgaagacttgattacaaaagaataaaaaacttcatatggaaattttatttgaaaatgagtggaagcgccttacattagaattacggacttaaaaattttgctaataaattgtgtgtttgaaaggtgaaaaaaaaaaaaaa

SEQ ID NO: 119 - DNA, 419 bp, Homo sapiens
  CDS 33..290
  sig_peptide 33..92: Von Heijne matrix score 5.4 seq WFVHSSALGLVLA/PP
aatggtaggccttcatgtgagccagttactacatgaatcttcatttcccacagtggtttgttcattcatcagcgttaggcttggtcctggctccacctttctcctctccgggcactgaccccacctttccgtgtatttactgtaggctattaaatatgatcatgacccgccttgcattttcattcatcacctgtttatgcccaaatttaaaggaagtttgtctcattttgccagaaaaaaattgtaatagtcggcacgctggatttgtagggccagcaaaattgcggcagtgaaactagtttcacttctaaagcccttcatttcccacaaggttaagctctcgaaaccccatttgatccttggttcctatttcgatcctcctttggaatctgaaaatcggtctccatgttgtatgcaaa

SEQ ID NO: 120 - DNA, 682 bp, Homo sapiens
  CDS 485..616
  polyA_site 669..682
ctcctttctcattccttatcttgcgtgtttttacctttttttcataactaagtttttgaggaagttagtgttcttttcaaagaaccggttcgaaatgtacttttctttgctactttttgttattttattgatcacatctttaatcttttgttctctatacgtggcctgttttgatttattttactattcttgctttctaaggtaagtattttgttgtgtagtgctttatttttttcatctttcttcttgaataataatgacatttttaggttataaattttcctctggtactcagtttgcctcattaattttggcagtaagcattctccttttattgctttctatgtagtctttaattttgcttttaacttcttctttgatctaaggattacctacttgttaatttccaaatattatcttatctatctatctatctatctatctatctatctatctatctacctatgtgagacgaagtctggctatgtcgccgaggctggagtgcagtggtgcaatcttggctcactgcaacccccgcctcccaggttcaagttattctcctgcctcagctacttgggtgagaggatcccttgagccggggaggttgaggctgcagtgagccataaccactactctccagcctggataacaaaagtgagactctgaccaaaaaaaaaaaaaa

SEQ ID NO: 121 - DNA, 1191 bp, Homo sapiens
  CDS 54..995
  sig_peptide 54..227: Von Heijne matrix score 4.1 seq LVHHCPTWQWATG/EE
  polyA_signal 1130..1135
  polyA_site 1181..1191
cacggctgcactttccatcccgtcgcggggccggccgctactccggccccaggatgcagaatgtgattaatactgtgaagggaaaggcactggaagtggctgagtacctgaccccggtcctcaaggaatcaaagtttagggaaacaggtgtaattaccccagaagagtttgtggcagctggagatcacctagtccaccactgtccaacatggcaatgggctacaggggaagaattgaaagtgaaggcatacctaccaacaggcaaacaatttttggtaaccaaaaatgtgccgtgctataagcggtgcaaacagatggaatattcagatgaattggaagctatcattgaagaagatgatggtgatggcggatgggtagatacatatcacaacacaggtattacaggaataacggaagccgttaaagagatcacactggaaaataaggacaatataaggcttcaagattgctcagcactatgtgaagaggaagaagatgaagatgaaggagaagctgcagatatggaagaatatgaagagagtggattgttggaaacagatgaggctaccctagatacaaggaaaatagtagaagcttgtaaagccaaaactgatgctggcggtgaagatgctattttgcaaaccagaacttatgacctttacatcacttatgataaatattaccagactccacgattatggttgtttggctatgatgagcaacggcagcctttaacagttgagcacatgtatgaagacatcagtcaggatcatgtgaagaaaacagtgaccattgaaaatcatcctcatctgccaccacctcccatgtgttcagttcacccatgcaggcatgctgaggtgatgaagaaaatcattgagactgttgcagaaggagggggagaacttggagttcatatgtatcttcttattttcttgaaatttgtacaagctgtcattccaacaatagaatatgactacacaagacacttcacaatgtaatgaagagagcataaaatctatcctaattattggttctgatttttaaagaattaacccatagatgtgaccattgaccatattcatcaatatatacagtttctctaataagggacttatatgtttatgcattaaataaaaatatgttccactaccagccttacttgtttaataaaaatcagtgcaaaaaaaaaaa

SEQ ID NO: 122 - DNA, 1008 bp, Homo sapiens
  CDS 657..923
  sig_peptide 657..896: Von Heijne matrix score 3.5 seq RGLLSACAPWGDG/ST
  polyA_signal 957..962
  polyA_site 974..1008
ntcgnatgtggcacaaaacccctctgctggctcatgtgtgcaactgagactgtcagagcatggctagctctggggtccagctctgctgggtgggggctagagaggaagcagggagtatctgcacacaggatgcctgcgctcaggtggttgcagaagtcagtgcccaggcccccccacacagtccccaaaggtccggcctccccagcgcggggctcctcgtttgaggggaggtgacttccctcccagcaggctcttggacacagtaagcttccccagccctgcctgagcagcctttcctccttgccctgttccccacctcccggctccagtccagggagctcccagggaagtggtcgacccctccagtggctgggccactctgctagagtccatccgccaagctgggggcatcggcaaggccaagctgcgcagcatgaaggagcgaaagctggagaagaagaagcagaaggagcaggagcaagtgagagccacgagccaaggtgggcacttgatgtcggatctcttcaacaagctggtcatgaggcgcaagggcatctctgggaaagaacctggggctggtgaggggcccggaggagcctttgcccgcgtgtcagactccatccctcctctgccgccaccgcagcagccacaggtagatgaggacaaggacgactgggaatcctagggggctccatgacaccttcccccgcagacccagacttggccgttgctctgacatggacacagccaggacaagctgctcagacctgcttccctgggagggggtgacggaaccagcactgtgtggagaccagcttcaaggaacggaaggctggcttgaggccacacagctggggcggggacttctgtctgcctgtgctccatggggggacggctccacccagcctgtgccactgtgttcttaagaggcttccagagaaaacggcacaccaatcaataaagaactgagcagaaaaaaaaaaaaaaaaaaaaaaaaaaaaaaaaaan

SEQ ID NO: 123 - DNA, 568 bp, Homo sapiens
  CDS 18..311
  sig_peptide 18..62: Von Heijne matrix score 8.4 seq AMWLLCVALAVLA/WG
agtgctgcttacccatcatggaagcaatgtggctcctgtgtgtggcgttggcggtcttggcatggggcttcctctgggtttgggactcctcagaacgaatgaagagtcgggagcagggaggacggctgggagccgaaagccggaccctgctggtcatagcgcaccctgacgatgaagccatgttttttgctcccacagtgctaggcttggcccgcctaaggcactgggtgtacctgctttgcttctctgcagttttccgtagggagctaagtgaatacaccgaaggtcttacctctgaacccctcacagcctagggacaggagcggccggcttacctggtgggttgggggacgtcggcagctcgcgtactacgccagcaggattgaggagcagagaaacagttgcagttggttgtattcagtacctgcatttccgttgggaactccacctgtacttgttattctgtggaactttttttatttgtagaaggagcaagaatattgaccttactatatagcacacgaaacaatctatgctgtatcgtgcctgctcaatccttaaagttaac

SEQ ID NO: 124 - DNA, 538 bp, Homo sapiens
  CDS 151..426
  sig_peptide 151..258: Von Heijne matrix score 5.2 seq KVALAGLLGFGLG/KV
  polyA_signal 505..510
  polyA_site 527..538
cactgggtcaaggagtaagcagaggataaacaactggaaggagagcaagcacaaagtcatcatggcttcagcgtctgctcgtggaaaccaagataaagatgcccattttccaccaccaagcaagcagctctgcctttttctcttgtaagcatgcttgtcacccagggactagtctaccaaggttatttggcagctaattctagatttggatcattgcccaaagttgcacttgctggtctcttgggatttggccttggaaaggtatcatacataggagtatgccagagtaaattccatttttttgaagatcagctccgtggggctggttttggtccacagcataacaggcactgcctccttacctgtgaggaatgcaaaataaagcatggattaagtgagaagggagactctcagccttcagcttcctaaattctgtgtctgtgactttcgaagttttttaaacctctgaatttgtacacatttaaaatttcaagtgtactttaaaataaaatacttctaatggaacaaaaaaaaaaaa

SEQ ID NO: 125 - DNA, 1747 bp, Homo sapiens
  CDS 10..1062
  sig_peptide 10..57: Von Heijne matrix score 4.9 seq FIYLQAHFTLCSG/WS
  polyA_signal 1710..1715
  polyA_site 1735..1747
gcctcaccaatggttcccttcatctatctgcaagcccactttacactctgttctgggtggtccagcacataccgggacctccggaagggtgtgtatgtgccctacacccagggcaagtgggaaggggagctgggcaccgacctggtaagcatcccccatggccccaacgtcactgtgcgtgccaacattgctgccatcactgaatcagacaagttcttcatcaacggctccaactgggaaggcatcctggggctggcctatgctgagattgccaggcctgacgactccccggagcctttctttgactctctggtaaagcagacccacgttcccaacctcttctccctgcagctttgtggtgctggcttccccctcaaccagtctgaagtgctggcctctgtcggagggagcatgatcattggaggtatcgaccactcgctgtacacaggcagtctctggtatacacccatccggcgggagtggtattatgaggtgatcattgtgcgggtggagatcaatggacaggatctgaaaatggactgcaaggagtacaactatgacaagagcattgtggacagtggcaccaccaaccttcgtttgcccaagaaagtgtttgaagctgcagtcaaatccatcaaggcagcctcctccacggagaagttccctgacggtttctggctaggagagcagctggtgtgctggcaagcaggcaccaccccttggaacattttcccagtcatctcactctacctaatgggtgaggttaccaaccagtccttccgcatcaccatccttccgcagcaatacctgcggccagtggaagatgtggccacgtcccaagacgactgttacaagtttgccatctcacagtcatccacgggcactgttatgggagctgttatcatggagggcttctacgttgtctttgatcgggcccgaaaacgaattggctttgctgtcagcgcttgccatgtgcacgatgagttcaggacggcagcggtggaaggcccnttttgtcaccttggacatggaagactgtggctacaacattccacagacagatgagtcaaccctcatgaccatagcctatgtcatggctgccatctgcgccctcttcatgctgccactctgcctcatggtgtgtcagtggcgctgcctccgctgcctgcgccagcagcatgatgactttgctgatgacatctccctgctgaagtgaggaggcccatgggcagaagatagggattcccctggaccacacctccgtggttcactttggtcacaagtaggagacacagatggcacctgtggccagagcacctcaggaccctccccacccaccaaatgcctctgccttgatggagaaggaaaaggctggcaaggtgggttccagggactgtacctgtaggagacagaaaagagaagaaagaagcactctgctggcgggaatactcttggtcacctcaaatttaagtcgggaaattctgctgcttgaaacttcagccctgaacctttgtcaccattcctttaaattctccaacccaaagtattcttcttttcttagtttcagaagtactggcatcacacgcaggttaccttggcgtgtgtccctgtggtaccctggcagagaagagaccaagcttgtttccctgctggccaaagtcagtaggagaggatgcacagtttgctatttgctttagagacagggactgtataaacaagcctaacattggtgcaaaaaaaaaaaaaa

SEQ ID NO: 126 - DNA, 1686 bp, Homo sapiens
  CDS 78..491
  sig_peptide 78..218: Von Heijne matrix score 5.8 seq LMCFGALIGLCAC/IC
  polyA_signal 1652..1657
  polyA_site 1673..1686
ggtatagcccaccagaaaggacagagtcatttgatgtggtcacaaaatgtgtgagtttcacactaactgagcagttcatggagaaatttgttgatcccggaaaccacaatagcgggattgatctccttaggacctatctttggcgttgccagttccttttaccttttgtgagtttaggtttgatgtgctttggggctttgatcggactttgtgcttgcatttgccgaagcttatatcccaccattgccacgggcattctccatctccttgcaggtctgtgtacactgggctcagtaagttgttatgttgctggaattgaactactccaccagaaactagagctccctgacaatgtatccggtgaatttggatggtccttctgccttgcttgtgtctctgctcccttacagttcatggcttctgctctcttcatctgggctgctcacaccaaccggagagagtacaccttaatgaaggcatatcgtgtggcatgagcaagaaactgcctgctttacaattgccatttttatttttttaaaataatactgatattttccccacctctcaattgtttttaatttttatttgtggatataccattttattatgaaaatctattttatttatacacattcaccactaaatacacacttaataccactaaaatttatgtggtttactttaagcgatgccatctttcaaataaactaatctaggtctagacagaaagaaatggatagagacttgacacaaatttatgaaagaaaattgggagtaggaatgtgaccgaaaacaagttgtgctaatgtctgttagacttttcagtaaaaccaaagtaactgtatctgttcaactaaaaactctatattagtttctttgggaaacctctcatcgtcaaaactttatgttcactttgctgttgtagatagccagtcaaccagcagtattagtgctgttttcaaagatttaagctctataaaattgggaaattatctaagatcattttccctaagcattgacacatagcttcatctgaggtgagatatggcagctgtttgtatctgcactgtgtctgtctacaaagagtgaaaaatacagtgtttacttgaaattttaactttgtaactgcaagaattccagttcggccgggcgaggattagtattatttttaactctccgtaagattttcagtaccaccaaattgttttggattttttttctttcctcttcacataccagggttattaaaagtgtgctttctttttacattatattacagttacaaggtaaaattcctcaactgctatttatttattccagcccagtactataaagaacgtttcaccataatgaccctccagagctgggaaacctaccacaagatctaaagttctggctgtccattaacctccaactatggtctttatttcttgtggtaatatgatgtgcctttccttgcctaaatcccttcctggtgtgtatcaacattatttaatgtcttctaattcagtcattttttataagtatgtctataaacattgaactttaaaaaacttatttatttattccactactgtagcaattgacagattaaaaaaatgtaacttcataatttcttaccataacctcaatgtcttttttaaaaaataaaattaaaaatgaaaagagacccaaaaaaaaaaaaaa

SEQ ID NO: 127 - DNA, 542 bp, Homo sapiens
  CDS 69..371
  sig_peptide 69..287: Von Heijne matrix score 4 seq AVGFLFWVIVLTS/WI
  polyA_signal 510..515
  polyA_site 530..542
tgttacttagggtcaaggcttgggtcttgccccgcaaacccttgggacgacccggccccagcgcagctatgaacctggagcgagtgtccaatgaggagaaattgaacctgtgccggaagtactacctgggggggtttgctttcttgccttttctctggttggtcaacatcttctggttctaccgagaggccttccttgtcccagcctacacagaacagagccaaatcaaaggctatgtctggcgctcagctgtgggcttcctcttctgggtgatagtgctcacctcctggatcaccatcttccagatctaccggccccgctggggtgcccttggggactacctctccttcaccatacccctgggcaccccctgacaacttctgcacatactggggccctgcttattctcccaggacaggctccttaaagcagaggagcctgtcctgggagccccttctcaaactcctaagacttgttctcatgtcccacgttctctgctgacatcccccaataaaggaccctaactttcaaaaaaaaaaaaa

SEQ ID NO: 128 - DNA, 1174 bp, Homo sapiens
  CDS 2..757
  sig_peptide 2..205: Von Heijne matrix score 7.3 seq LRLILSPLPGAQP/QQ
  polyA_site 1160..1174
gatgcctgagggccccgagctgcacctggccagccagtttgtgaatgaggcctgcagggcgctggtgttcggcggctgcgtggagaagtcctctgtcagccgcaaccctgaggtgccctttgagagcagtgcctaccgcatctcagcttcagcccgcggcaaggagctgcgcctgatactgagccctctgcctggggcccagcctcaacaggagccactggccctggtcttccgcttcggcatgtccggctcttttcagctggtgccccgcgaggagctgccacgccatgcccacctgcgcttttacacggccccgcctggcccccggctcgccctatgtttcgtggacatccgccggttcggccgctgggaccttgggggaaagtggcagccgggccgcgggccctgtgtcttgcaggagtaccagcagttcagggagaatgtgctacgaaacctagcggataaggcctttgaccggcccatctgcgaggccctcctggaccagaggttcttcaatggcattggcaactatctgcgggcagagatcctgtaccggctgaagatccccccctttgagaaggcccgctcggtcctggaggccctgcagcagcacaggccgagcccggagctgaccctgagccagaagataaggaccaagctgcagaattcagacctgctggagctatgtcactcagtgcccaaggaagtggtccagttgggtgaggccaaagatggcagcaacctctgcttcagcaaatgattgtgtaaccctggggcacttgtccccctctggacctgattcaccgatttggaagtttgtagccctagctgatactcaatggactaggcctcctcacttgtcaatagtgtttccaggctgggcgcagtggctcatgcctgtggtcccggcacttcgggaggccgagtggggtggctcacctgaggtcaggagttcgagaccatcctggccaacatggtgaaaccccatctccactaaaatgcaaaaaattagccaggtgtggtggcgggcacctgtagtctcagctactcgggaggatgaggcaggaaaatcgcttgaacccaggaggtggaggttgcagttgagctgagatcgtgccattgcactccagcctgggcaacgagagcaaaactccatctcaaaaaaaaaaaaaaa

SEQ ID NO: 129 - DNA, 1285 bp, Homo sapiens
  CDS 2..1051
  sig_peptide 2..205: Von Heijne matrix score 7.3 seq LRLILSPLPGAQP/QQ
  polyA_signal 1248..1253
  polyA_site 1272..1285
gatgcctgagggccccgagctgcacctggccagccagtttgtgaatgaggcctgcagggcgctggtgttcggcggctgcgtggagaagtcctctgtcagccgcaaccctgaggtgccctttgagagcagtgcctaccgcatctcagcttcagcccgcggcaaggagctgcgcctgatactgagccctctgcctggggcccagccccaacaggagccactggccctggtcttccgcttcggcatgtccggctcttttcagctggtgccccgcgaggagctgccacgccatgcccacctgcgcttttacacggccccgcctggcccccggctcgccctatgtttcgtggacatccgccggttcggccgctgggaccttgggggaaagtggcagccgggccgcgggccctgtgtcttgcaggagtaccagcagttcaggctgaagatccccccctttgagaaggcccgctcggtcctggaggccctgcagcagcacaggccgagcccggagctgaccctgagccagaagataaggaccaagctgcagaatccagacctgctggagctatgtcactcagtgcccaaggaagtggaccagttggggggcaggggctacgggtcagagagcggggaggaggactttgctgcctttcgagcctggctgcgctgctatggcatgccaggcatgagctccctgcaggaccggcatggccgtaccatctggttccagggggatcctggaccgttggcacccaaagggcgcaagtcccgcaaaaagaaatccaaggccacacagctgagtcctgaggacagagtggaggacgctttgcctccaagcaaggccccttccaagacacgaagggcaaagagagaccttcctaagaggactgcaacccagcggcctgaggggaccagcctccagcaggacccagaagctcccacagtgcccaagaaggggaggaggaaggggcgacaggcagcctctggccactgcagaccccggaaggtcaaggctgacatcccatccttggaaccagaggggacctcagcctcttagcaggaggctctccttgcttgcactcaccctttcttattgtcttgccctgcatctgggggtctgaatttttgggagcaggcaatatctgaaggtgcaaacaggccctacggctgttccctgcacaactctcatggttttaattgtaccccatcttccacatctttaaagctcatgtgaaaaatgctgcatttttaataaactgatacatttgaactccaaaaaaaaaaaaaa

SEQ ID NO: 130 - DNA, 1398 bp, Homo sapiens
  CDS 2..1171
  sig_peptide 2..205: Von Heijne matrix score 7.3 seq LRLILSPLPGAQP/QQ
  polyA_signal 1368..1373
  polyA_site 1386..1398
gatgcctgagggccccgagctgcacctggccagccagtttgtgaatgaggcctgcagggcgctggtgttcggcggctgcgtggagaagtcctctgtcagccgcaaccctgaggtgccctttgagagcagtgcctaccgcatctcagcttcagcccgcggcaaggagctgcgcctgatactgagccctctgcctggggcccagccccaacaggagccactggccctggtcttccgcttcggcatgtccggctcttttcagctggtgccccgcgaggagctgccacgccatgcccacctgcgcttttacacggccccgcctggcccccggctcgccctatgtttcgtggacatccgccggttcggccgctgggaccttgggggaaagtggcagccgggccgcgggccctgtgtcttgcaggagtaccagcagttcagggagaatgtgctacgaaacctagcggataaggcctttgaccggcccatctgcgaggccctcctggaccagaggttcttcaatggcattggcaactatctgcgggcagagatcctgtaccggctgaagatccccccctttgagaaggcccgctcggtcctggaggccctgcagcagcacaggccgagcccggagctgaccctgagccagaagataaggaccaagctgcagaatccagacctgctggagctatgtcactcagtgcccaaggaagtggtccagttggggggcagaggctacgggtcagagagcggggaggaggactttgctgcctttcgagcctggctgcgctgctatggcatgccaggcatgagctccctgcaggaccggcatggccgtaccatctggttccagggggatcctggaccgttggcacccaaagggcgcaagtcccgcaaaaagaaatccaaggccacacagctgagtcctgaggacagagtggaggacgctttgcctccgagcaaggccccttccaggacacgaagggcaaagagagaccttcctaagaggactgcaacccagcggcctgaggggaccagcctccagcaggacccagaagctcccacagtgcccaagaaggggaggaggaaggggcgacaggcagcctctggccactgcagaccccggaaggtcaaggctgacatcccatccttggaaccagaggggacctcagcctcttagcaggaggctctccttgcttgcactcaccctttcttattgtcttgccctgcatctgggggtctgaatttttgggagcaggcaatatctgaaggtgcaaacaggccctacggctgttccctgcacaactctcatggttttaattgtaccccatcttccacatctttaaagctcatgtgaaaaatgctgcatttttaataaactgatacatttgaaaaaaaaaaaaa

SEQ ID NO: 131 - DNA, 821 bp, Homo sapiens
  CDS 42..611
  sig_peptide 42..287: Von Heijne matrix score 4.4 seq NLPHLQVVGLTWG/HI
  polyA_signal 787..792
  polyA_site 808..821
ccgttgccagttctgcgcgtgtcctgcgtctccagtatggaatgtatgtttggccctgtgctgtggtcctggcccagtacctttggtttcacagaagatctctgccaggcaaggccatcttagagattggagcaggagtgagccttccaggaattttgactgccaaatgtggtgcagaagtaatactgtcagacagctcagaactgcctcactgtctggaagtctgtcggcaaagctgccaaatgaataacctgccacatctgcaggtggtaggactaacatggggtcatatatcttgggatcttctggctctaccaccacaagatattatccttgcatctgatgtgttctttgaaccagaagattttgaagacattttggctacaatatattttttgatgcacaagaatcccaaggtccaattgtggtctacttatcaagttaggagtgctgactggtcacttgaagctttactctacaaatgggatatgaaatgtgtccacattcctcttgagtcttttgatgcagacaaagaagatatagcagaatctacccttccaggaagacatacagttgaaatgctggtcatttcctttgcaaaggacagtctctgaattatacctacaacctgttctgggacagtatcaatactgatgagcaacctggcacacaaactatgagcagaccacttcagcttgagaatgcagtgggtctgaagatggtcaagtctgtctgccttagattttgatgtcacctagacaacacttaaactcatatgaaacaaaaattaaaatacgtattacaagtaaaaaaaaaaaaaa

SEQ ID NO: 132 - DNA, 916 bp, Homo sapiens
  CDS 62..916
  sig_peptide 62..757: Von Heijne matrix score 4.2 seq LVTPAALRPLVLG/GN
  polyA_site 904..916
cctgaatgacttgaatgtttccccgcctgagctaacagtccatgtgggtgattcagctctgatgggatgtgttttccagagcacagaagacaaacgtatattcaagatagactggactctgtcaccaggagagcacgccaaggacgaatatgtgctatactattactccaatctcagtgtgcctattgggcgcttccagaaccgcgtacacttgatgggggacaacttatgcaatgatggctctctcctgctccaagatgtgcaagaggctgaccagggaacctatatctgtgaaatccgcctcaaaggggagagccaggtgttcaagaaggcggtggtactgcatgtgcttccagaggagcccaaagagctcatggtccatgtgggtggattgattcagatgggatgtgttttccagagcacagaagtgaaacacgtgaccaaggtagaatggatattttcaggacggcgcgcaaaggaggagattgtatttcgttactaccacaaactcaggatgtctgcggagtactcccagagctggggccacttccagaatcgtgtgaacctggtgggggacattttccgcaatgacggttccatcatgcttcaaggagtgagggagtcagatggaggaaactacacctgcagtatccacctagggaacctggtgttcaagaaaaccattgtgctgcatgtcagcccggaagagcctcgaacactggtgaccccggcagccctgaggcctctggtcttgggtggtaatcagttggtgatcattgtgggaattgtctgtgccacaatcctgctgctccctgtcctgatattgatcgtgaagaagacctgtggaaataagagttcagtgaattctacagtcttggtgaagaacacgaagaagactaatccaaaaaaaaaaaaa

SEQ ID NO: 133 - DNA, 1153 bp, Homo sapiens
  CDS 62..520
  polyA_signal 1124..1129
  polyA_site 1141..1153
cctgaatgacttgaatgtttccccgcctgagctaacagtccatgtgggtgattcagctctgatgggatgtgttttccagagcacagtagacaaatgtatattcaagatagactggactctgtcaccaggagagcacgccaaggacgaatatgtgctatactattactccaatctcagtgtgcctattgggcgcttccagaaccgcgtacacttgatgggggacatcttatgcaatgatggctctctcctgctccaagatgtgcaagaggctgaccagggaacctatatctgtgaaatccgcctcaaaggggagagccaggtgttcaagaaggcggtggtactgcatgtgcttccagaggagcccaaagagctcatggtccatgtgggtggattgattcagatgggatgtgttttccagagcacagaagtgaaacacgtgaccaaggtagaatggatattttcaggacggcgcgcaaaggtaacaaggaggaaacatcactgtgttagagaaggctctggctgatggtatcaggacaaaggtagaatcaggcacatgaggaggtgttgcaagagcctgggctttggtgcttatcagaactggaccttctcctagcaatttcagctttctggtgggaaaggtaactccaatgaagaacaagaacaagaagatgatgatgatgcttaactttttggatgccgatatgagattgtacatgtaaagcattttgtataagacttggcccctgcattttagtttccttctttctcccttttccttcgtatagagtccatgggagaatgagggagatgatttttgtggcccagccaagaaagcaatgggctagacattaaaatgattacacttttattcttactggggttagttctgtgagttttcatctgtgccccattgccccatttatgtgatggagggaattttcatgggtacttcacgtgttgggattgattgatcctgggggccagggtgaagggtattttacgggacctctataaagcaggaagaagcaagtttattctttagaccagtagctctcaaccatgatgtggtcatatatttatgggtcaacatgtgttgtggggatatcccaagtaacttgttattaataaaagttaagttgcaaaaaaaaaaaaa

SEQ ID NO: 134 - DNA, 1517 bp, Homo sapiens
  CDS 21..167
  misc_feature (28, 996): unknown
ctctgaaatgcttgtcttttatgctggnaggtgaccatagggctctgcttttaaagatatggctgcttcaaaggccagagtcacaggaaggacttcttccagggagattagtggtgatggagaggagagttaaaatgacctcatgtccttcttgtccacggttttgttgagttttcactcttctaatgcaagggtctcacactgtgaaccacttaggatgtgatcactttcaggtggccaggaatgttgaatgtctttggctcagttcatttaaaaaagatatctatttgaaagttctcagagttgtacatatgtttcacagtacaggatctgtacataaaagtttctttcctaaaccattcaccaagagccaatatctaggcattttcttggtagcacaaattttcttattgcttagaaaattgtcctccttgttatttctgtttgtaagacttaagtgagttaggtctttaaggaaagcaacgctcctctgaaatgcttgtcttttatgctgggaggtgaccatagggctctgcttttaaagatatggctgcttcaaaggccagagtcacaggaaggacttcttccagggagattagtggtgatggagaggagagttaaaatgacctcatgtccttcttgtccacggttttgttgagttttcactcttctaatgcaagggtctcacactgtgaaccacttaggatgtgatcactttcaggtggccaggaatgttgaatgtctttggctcagttcatttaaaaaagatatctatttgaaagttctcagagttgtacatatgtttcacagtacaggatctgtacataaaagtttctttcctaaaccattcaccaagagccaatatctaggcattttcttggtagcacaaattttcttattgcttagaaaattgtcctccttgttatttctgtttgtaagacttaagtgagttaggtctttaaggaaagcaacgctcctctgaaatgcttgtctttnatgctgggaggtgaccatagggctctgcttttaaagatatggctgcttcaaaggccagagtcacaggaaggacttcttccagggagattagtggtgatggagaggagagttaaaatgacctcatgtccttcttgtccacggttttgttgagttttcactcttctaatgcaagggtctcacactgtgaaccacttaggatgtgatcactttcaggtggccaggaatgttgaatgtctttggctcagttcatttaaaaaagatatctatttgaaagttctcagagttgtacatatgtttcacagtacaggatctgtacataaaagtttctttcctaaaccattcaccaagagccaatatctaggcattttcttggtagcacaaattttcttattgcttagaaaattgtcctccttgttatttctgtttgtaagacttaagtgagttaggtctttaaggaaagcaacgctcctctgaaatgcttgtcttttatgctgggaggtgaccatagggctctgctttta

SEQ ID NO: 135 - DNA, 526 bp, Homo sapiens
  CDS 22..318
  sig_peptide 22..93: Von Heijne matrix score 4.6 seq FFIFCSLNTLLLG/GV
  polyA_signal 497..502
  polyA_site 516..526
ctgcctgctgcttgctgcaccatgaagtctgccaagctgggatttcttctaagattcttcatcttctgctcattgaataccctgttattgggtggtgttaataaaattgcggagaagatatgtggagacctcaaagatccctgcaaattggacatgaattttggaagctgctatgaagttcactttagatatttctacaacagaacctccaaaagatgtgaaacttttgtcttctccggctgtaatggcaaccttaacaacttcaagcttaaaatagaacgtgaagtagcctgtgttgcaaaatacaaaccaccgaggtgagaggatgtgaactcatgaagttgtctgctgcaccatccgaaataaagacacaagaaaattcagactgattttgaaatctttgtaatatttccataatgctttaagcttccatatgtttgctattttcctgaccctagttttgtctttcctggaaattaactgtatgatcattagaatgaaagagtctttctgtcaaaaaaaaaaa

SEQ ID NO: 136 - DNA, 352 bp, Homo sapiens
  CDS 8..292
  sig_peptide 8..118: Von Heijne matrix score 5.6 seq WLLLDALLRLGDT/KK
  polyA_signal 317..322
  polyA_site 339..352
ctgagatatggcaagtcccgctgtaaacaggtggaaaaggccaaggttgaagccggtgtggccacggcgcttggaatcctggttgttgctggatgctcttttgcgattaggagataccaaaaaaaagcgacagcctgaagcagccacaaaatcctgtgttagaagcagctgtgggggtcccagtggagatgggcctcccccatgcctccagcagcctgaccctcgtgccctgtctcaggcgttctctagatcctttcctctgtttccctctctcgctggcaaaagtatgatctaattgaaacaagactgaaggatcaataaacagccatctgccccttcaaaaaaaaaaaaa

SEQ ID NO: 137 - DNA, 542 bp, Homo sapiens
  CDS 16..378
  sig_peptide 16..84: Von Heijne matrix score 9.8 seq FLLFFFLFLLTRG/SL
  polyA_signal 502..507
  polyA_site 522..542
cacgacctgtgggccatgatgctaccccaatggctgctgctgctgttccttctcttcttctttctcttcctcctcaccaggggctcactttctccaacaaaatataaccttttggagctcaaggagtcttgcatccggaaccaggactgcgagactggctgctgccaacgtgctccagacaattgcgagtcgcactgcgcggagaaggggtccgagggcagtctgtgtcaaacgcaggtgttctttggccaatatagagcgtgtccctgcctgcggaacctgacttgtatatattcaaagaatgagaaatggcttagcatcgcctatggccgttgtcagaaaattggaaggcagaagttggctaagaaaatgttcttctagtgctccctccttcttgctgcctcctcctcctccacctgctctcctccctacccagagctctgtgttcaccctgttccccagagcctccaccatgagtggagggaagtggggagtgattgaaataaagagctttttcaatgaaaaaaaaaaaaaaaaaaaaa

SEQ ID NO: 138 - DNA, 233 bp, Homo sapiens
  CDS 57..233
gcaaaaccaaaaccagcaccgatcccgacatagatcagtgacgtctttttcttcagatgatcctatgtttccttcttcctcatcatcgtcttcaggaagccagacagattcaagtattgaagatgctgccaagggaaaaattaagaagaagagaagagagaaaacaaataaatgggaaaaaagaaaggacaaaatatgaaacaccaagaaaaagagaaggaaaaaaaaaaaaa

SEQ ID NO: 139 - DNA, 660 bp, Homo sapiens
  CDS 83..340
  sig_peptide 83..124: Von Heijne matrix score 7.5 seq VALNLILVPCCAA/WC
  polyA_signal 573..578
  polyA_site 607..660
gaatttgtaaaacttctgctcgtttacactgcacattgaatacaggtaactaattggaaggagaggggagatcactcttttgatggtggccctgaacctcattctggttccctgctgcgctgcttggtgtgacccacggaggatccactcccaggatgacgtgccccgtagctctgctgctgatactgggtctgcgatgcagcggcgtgaggcctgggctggttggagaaggtcacaacccttctctgttggtctgccttctgctgaaagactcgagaaccaaccagggaagctgtcctggaggtccctggtcggagagggatatagaatctgtgacctctgacaactgtgaagccaccctgggctacagaaaccacagtcttcccagcaattattacaattcttgaattccttggggattttttactgccctttcaaagcacttaagtgttagatctaacgtgttccagtgtctgtctgaggtgacttaaaaaatcagaacaaaacttctattatccagagtcatgggagagtacaccctttccaggaataatgttttgggaaacactgaaatgaaatcttcccagtattataaattgtgtatttaaaaaaagaaacttttctgaatgcctacctggcggtgtataccaggcagtgtgc

SEQ ID NO: 140 - DNA, 605 bp, Homo sapiens
  CDS 47..541
  sig_peptide 47..220: Von Heijne matrix score 5.4 seq QLLDSVLWLGALG/LT
  polyA_site 597..605
aaagtgggaggagcactaggtcttcccgtcacctccacctctctccatgacccggctctgcttacccagacccgaagcacgtgaggatccgatcccagttcctccaaggggcctgggtgctggggaggggtcaggtagtccagtgcgtccacctgtatccacctggggccctagctgggcccagctcctggacagtgtcctatggctgggggcactaggactgacaatccaggcagtcttttccaccactggcccagccctgctgctgcttctggtcagcttcctcacctttgacctgctccataggcccgcaggtcacactctgccacagcgcaaacttctcaccaggggccagagtcagggggccggtgaaggtcctggacagcaggaggctctactcctgcaaatgggtacagtctcaggacaacttagcctccaggacgcactgctgctgctgctcatggggctgggcccgctcctgagagcctgtggcatgcccttgaccctgcttggcctggctttctgcctccatccttgggcctgagagcccctccccacaactcagtgtccttcaaatatacaatgaccacccttcttcaaaaaaa

SEQ ID NO: 141 - DNA, 396 bp, Homo sapiens
  CDS 46..285
  sig_peptide 46..150: Von Heijne matrix score 3.6 seq LEPGLSSSAACNG/KE
  polyA_signal 364..369
  polyA_site 385..396
cctctacaggaatcagactcagcctcttttggttttcagtgaagtatgccttttcaatttggaacccagccaaggaggtttccagtggaaggaggagattcttcaattgagctggaacctgggctgagctccagtgctgcctgtaatgggaaggagatgtcaccaaccaggcaactccggaggtgccctggaagtcattgcctgacaataactgatgttcccgtcactgtttatgcaacaacgagaaagccacctgcacaaagcagcaaggaaatgcatcctaaatagcaccattaagtcttttgtcaaggtctgactaggtcaagggtaatggaccagtatcatctggtgatctggtaaacaaataaaagtggtggcaccttcaaaaaaaaaaaa

SEQ ID NO: 142 - DNA, 432 bp, Homo sapiens
  CDS 22..240
  sig_peptide 22..84: Von Heijne matrix score 12 seq VLVLCVLLLQAQG/GY
  polyA_signal 397..402
  polyA_site 421..432
gctcacgctctggtcagagttatggcaccccagactctgctgcctgtcctggttctctgtgtgctgctgctgcaggcccagggaggataccgtgacaagatgaggatgcagagaatcaaggtctgtgagaagcgacccagcatagatctatgcatccaccactgttcatgtttccaaaagtgtgaaacaaataagatatgctgttcagccttctgtgggaacatttgtatgagcatcctatgagtgggagagtgggctgggatgtgcatcctgctccctgaacccttccatccgagactgtgcccacatccgaagcacaaggacatcaaatcatcagcacaagaacatcaacaggaatgccaccctccccagtgtctgaactccctgtccctgtcaaatgaaccagaacaaatgcccatgaaaaaaaaaaaa

SEQ ID NO: 143 - DNA, 420 bp, Homo sapiens
  CDS 89..382
  polyA_site 408..420
gcttgcctgacccccatgtcgcctctgtaggtagaagaagtatgtcttcctggaccccctggctggtgctgtaacaaagacccatgtgatgctgggggcagagacagaggagaagctgtttgatgcccccttgtccatcagcaagagagagcagctggaacagcaggtcccagagaactacttctatgtgccagacctgggccaggtgcctgagattgatgttccatcctacctgcctgacctgcccggcattgccaacgacctcatgtacattgccgacctgggccccggcattgccccctctgcccctggcaccattccagaactgcccaccttccacactgaggtagccgagcctctcaagacctacaagatggggtactaacagcaccaccaccgcccccaccaaaaaaaaaaaaa

SEQ ID NO: 144 - DNA, 501 bp, Homo sapiens
  CDS 80..415
  sig_peptide 80..142: Von Heijne matrix score 5.4 seq TFCLIFGLGAVWG/LG
  polyA_signal 471..476
  polyA_site 488..501
cccgcttgattccaagaacctcttcgatatttatttttatttttaaagagggagacgatggactgagctgatccgcaccatggagtctcgggtcttactgagaacattctgtttgatcttcggtctcggagcagtttgggggcttggtgtggacccttccctacagattgacgtcttaacagagttagaacttggggagtccacgaccggagtgcgtcaggtcccggggctgcataatgggacgaaagcctttctctttcaagatactcccagaagcataaaagcatccactgctacagctgaacagttttttcagaagctgagaaataaacatgaatttactattttggtgaccctaaaacagacccacttaaattcaggagttattctctcaattcaccacttggatcacaggtaaatgtggttgctggagtttcctgtgttttcattatatgtggttaaatgaatatattaaagagaagtaaacaaaaaaaaaaaaaa

SEQ ID NO: 145 - DNA, 454 bp, Homo sapiens
  CDS 152..361
  sig_peptide 152..283: Von Heijne matrix score 4.7 seq FLLSLSLITYCFW/DP
gacattttacttttttctgttaacgcttaccctagaaattagaaatgacaccacgtattcttagcgaagtccagttttcagcattttgtccttattggacaatagcaaggatattagaacgtgttggttccgcgtgcttccgtcttgagttatgtgctgctattgtcggatattttgtcttagatgtacgtactttcctgttcattgtggtatgtgtaatttgcgttactttgaattttccacgtttttactttctttgtctctcatcacttactgcttttgggaccccccccatcggggttcacattccctctccctagagcacactcccttggatttcctcgagtggggtctgctgcggtgaagctttcccattttatgtgcagattattttcagagggtatatagaattcaggcagctgtttcgttgtagcacattaaaaatattttcccc

SEQ ID NO: 146 - DNA, 1272 bp, Homo sapiens
  CDS 32..307
  sig_peptide 32..70: Von Heijne matrix score 4.2 seq MLFSLSLLSNLNQ/IG
  polyA_signal 1240..1245
  polyA_site 1261..1272
gtcaggttgcaccgccctttggttcccgagcatgctgttttctctcagccttctctccaaccttaaccaaatcggcagcagccacctcgaccgcccacacattcctggccaatcagctcagctgtttatttaccaaatgtcttcacaacaactacagcagcagccttcggctaacaaaaaagcaggaaaaatccacaacacccccttcgccaaccaactaaatccaacgcaacatctggcaaaaccttttcagcaaattcttcctggccgtcagtccggcagcctcacctcaccatttctagcttgctgaaacccaaaactaatctccaagaaggagaagcttctctcgcagccggagcaggtccctttctagagataggagaagagagagatcgctgtctcgggagagaaatcacaagccgtcccgatccttctctaggtctcgtagtcgatttaggtcaaatgaaaggaaatagaagacagtttgcaagagaagtggtgtacaggaaattacttcatttgacaggagtatgtacagaaaattcaagttttgtttgagacttcataagcttggtgcatttttaagatgttttagctgttcaaatctgtttgtctcttgaaacagtgacacaaaagtgtaattctctatggtttgaaatggatcatacgaggcatgtaataccaagaattgttactttacaatgttcccttaagcaaaattgaatttgctttgaacttttagttatgcacagactgataataaacctctaaacctgcccagcggaagtgtgtttttttttaaatttaaatacagaaacaactggcaaaaattgaactaagatttacttttttttccatagctgggatataggctgcagctatagttgaacaagcagtctttaaaaactgctgtgaaacacaggccatcagggaaaacgaaatgctgcactattaaattagaggtttttgaaaaatccaactctcatcctgggcagaggttgcctagttggtatagaatgttaagtttcaagaaagtttacctttgctttaggtcgtaagttccttatttgattgccgtatatggatacatggctgttcgtgacattctttatgtgcaaatttgtgatttcaaaaatgtcctgccagtttaagggtacattgtagagccgaactttgagttactgtgcaagattttttttcatgctgtcatttgtaatatgttttgtgagaatccttgggattaaagttttggttacagattaaaaaaaaaaa

SEQ ID NO: 147 - DNA, 804 bp, Homo sapiens
  CDS 114..734
  sig_peptide 114..239: Von Heijne matrix score 5.2 seq LLFDLVCHEFCQS/DD
  polyA_signal 768..773
  polyA_site 793..804
ccaacaccaggaagagtctgaagagcagccagtgtttcggcttgtgccctgtatacttgaagctgccaaacaagtacggtagttctgaaaatccagaatggcttgatgtttacatgcacattttacaactgcttactacagtggatgatggaattcaagcaattgtacattgtcctgacactggaaaagacatttggaatttactttttgacctggtctgccatgaattctgccagtctgatgatccacccatcattcttcaagaacagaaaacagtgctagcctctgttttttcagtgttgtctgccatctatgcctcacagactgagcaagagtatctaaagatagaaaaagtagatcttcctctaattgacagcctcattcgggtcttacaaaatatggaacagtgtcagaaaaaaccagagaactcggcagagtctaacacagaggaaactaaaaggactgatttaacccaagatgatctccacttgaaaatcttaaaggatattttatgtgaatttctttctaatatttttcaggcattaacaaaggagacggtggctcagggagtaaaggaaggccagttgagcaaacagaagtgttcctctgcatttcaaaaccttcttcctttctatagccctgtggtggaagattttattaaaatcctacgtgaagttgataaggcgcttgctgatgacttggaaaaaaacttcccaagtttgaaggttcagacttaaaacctgaattggaattacttctgtacaagaaataaactttatttttctcactgacaaaaaaaaaaaa

SEQ ID NO: 148 - DNA, 802 bp, Homo sapiens
  CDS 199..801
  polyA_signal 780..785
  polyA_site 791..802
agtcaccgcctgcttcgcactgagcctcccgactcagactctgagtccagctccgaagaggaagaggaattcggtgtggttggaaatcgctctcgctttgccaagggagactatttacgatgctgcaagatctgttatccgctctgtggttttgtcatccttgctgcctgtgttgtggcctgtgttggcttggtgtggatgcaggttgctctcaaggaggatctggatgccctcaaggaaaaatttcgaacaatggaatctaatcagaaaagctcattccaagaaatccccaaacttaatgaagaactactcagcaagcaaaaacaacttgagaagattgaatctggagagatgggtttgaacaaagtctggataaacatcacagaaatgaataagcagatttctctgttgacttctgcagtgaaccacctcaaagccaatgttaagtcagctgcagacttgattagcctgcctaccactgtagagggacttcagaagagtgtagcttccattggcaatactttaaacagcgtccatcttgctgtggaagcactacagaaaactgtggatgaacacaagaaaacgatggaattactgcagagtgatatgaatcagcacttcttgaaggagactcctggaagcaaccagatcattccgtcaccttcagccacatcagaacttgacaataaaacccacagtgagaatttgaaacagatgggtgatagatctgccactctgaaaagacagtctttggaccaagtcaccaacagaacagatacagtaaaaatccaaaaaaaaaaaa

SEQ ID NO: 149 - DNA, 1490 bp, Homo sapiens
  CDS 38..1174
  sig_peptide 38..148: Von Heijne matrix score 7.3 seq LLSACLVTLWGLG/EP
  polyA_signal 1452..1457
  polyA_site 1478..1490
tcatcatccagagcagccagtgtccgggaggcagaagatgccccactccagcctgcatccatccatcccgtgtcccaggggtcacggggcccagaaggcagccttggttctgctgagtgcctgcctggtgaccctttgggggctaggagagccaccagagcacactctccggtacctggtcctccacctagcctccctgcagctgggactgctgttaaacggggtctgcagcctggctgaggagctgcgccacatccactccaggtaccggggcagctactggaggactgtgcgggcctgcctgggctgccccctccgccgtggggccctgttgctgctgtccatctatttctactactccctcccaaatgcggtcggcccgcccttcacttggatgcttgccctcctgggcctctcgcaggcactgaacatcctcctgggcctcaagggcctggccccagctgagatctctgcagtgtgtgaaaaagggaatttcaacgtggcccatgggctggcatggtcatattacatcggatatctgcggctgatcctgccagagctccaggcccggattcgaacttacaatcagcattacaacaacctgctacggggtgcagtgagccagcggctgtatattctcctcccattggactgtggggtgcctgataacctgagtatggctgaccccaacattcgcttcctggataaactgccccagcagaccggtgaccgtgctggcatcaaggatcgggtttacagcaacagcatctatgagcttctggagaacgggcagcgggcgggcacctgtgtcctggagtacgccacccccttgcagactttgtttgccatgtcacaatacagtcaagctggctttagccgggaggataggcttgagcaggccaaactcttctgccggacacttgaggacatcctggcagatgcccctgagtctcagaacaactgccgcctcattgcctaccaggaacctgcagatgacagcagcttctcgctgtcccaggaggttctccggcacctgcggcaggaggaaaaggaagaggttaccgtgggcagcttgaagacctcagcggtgcccagtacctccacgatgtcccaagagcctgagctcctcctcagtggaatgggaaagcccctccctctccgcacggatttctcttgagacccagggtcaccaggccagagcctccagtggtctccaagcctctggactgggggctctcttcagtggctgaatgtccagcagagctatttccttccacagggggccttgcagggaagggtccaggacttgacatcttaagatgcgtcttgtccccttgggccagtcatttcccctctctgagcctcggtgtcttcaacctgtgaaatgggatcataatcactgccttacctccctcacggttgttgtgaggactgagtgtgtggaagtttttcataaactttggatgctagtgtacttaaaaaaaaaaaaa

SEQ ID NO: 150 - DNA, 361 bp, Homo sapiens
  CDS 26..361
  polyA_site 350..361
tcgagaagctgccccttagccaaccatgccgtctgagggtcgctgctgggagaccttgaaggccctacgcagttccgacaaaggtcgcctttgctactaccgcgactggctgctgcggcgcgaggatgttttagaagaatgtatgtctcttcccaagctatcttcttattctggatgggtggtagagcacgtcctaccccatatgcaggagaaccaacctctgtctgagacttcgccatcctctacgtcagcttcagccctagatcaaccctcatttgttcccaaatctcctgacgcaagctctgccttttccccagcctcccctgcaacaccaaatggaaccaagggcaaaaaaaaaaaa

SEQ ID NO: 151 - DNA, 605 bp, Homo sapiens
  CDS 3..131
  polyA_site 591..605
catcccttccccaggctttatggttccagttcttctaccactctggaagctccctagaatctcctggaatgcttaatggacctttccagcaccgaaattcaagaattatgactcatcggtcagcagaaaagtgaggataccttttcctaacctacctgcttcccctgcagtttcctcacaatcttactctttatattttagcatatgtagcttctcaggatgttaattctgttctctctgtgttggtgtctgagcacccagaaggtagagccaggggcacttataaaccaggagcattatttgacaggcacttaagaaagacactggctacgtaatcccagcactttgggaggctgaggcggatggatcacatgaggtcaggagttcgagaccagcctggccagcatggtgaaaccctgtctctactaaaaatacaaaaattagctgggtgtggttgcacacgcctgtaatcccagctacctgggaggctgaggcaggagaatcgcttgaacttgggaggcggaggttgcagtgagcctagattttgccattgcactccagcctgggtgacaagggcgaaactccatcccaaaaaaaaaaaaaaa

SEQ ID NO: 152 - DNA, 591 bp, Homo sapiens
  CDS 33..185
  sig_peptide 33..80: Von Heijne matrix score 3.7 seq IALTLIPSMLSRA/AG
  polyA_signal 570..575
  polyA_site 586..591
caatcttctcagcttataaccgtctttcccttatgctaaggatagcccttacactcatcccatctatgctgtcaagggctgctggttggtgctggtacaaggagcccactcagcagttttcttacctttgcctgccctgcctttcatggaataagaaaggcaacgttttgcagcttccaaatttctgaagaaactaatctcagattggcagttaaagtcaaaatgttgccaaatatttattccttttgcctaagtttggctacccggttcaattgctttttatttttaatgtcttgactcttcagagttcgtacctcaaaagaacaatgagaacatttgctttgctttctgctgaatccctaatctcaacaatctatacctggactgtccagttctcctcctgtgctatcttctcttctatccaagtagaatgtatgccaggagctccttccctctagcaatttctactaaaatgtccaagtagaatgtttccttttacaatcaaattactgtatttattaatttgctagaatccagtaaatcattttggtagctctggctgtgctatcaataaaaagatgaaagcaaaaa

SEQ ID NO: 153 - DNA, 1150 bp, Homo sapiens
  CDS 184..915
  sig_peptide 184..237: Von Heijne matrix score 3.5 seq LLGLELSEAEAIG/AD
  polyA_signal 1119..1124
  polyA_site 1139..1150
cggatttgacgatggtgttcggtcttgaatggaaatgtagtcttaggccagtcttaggtttttgaacaggatagtaggtatccggagtcgattgagggccagagcaggcactggggttcggatcctgggcaaagtttcccacgttgagggtctcgaggacgcctagatctctttcccagggccatggcgaacccgaagctgctgggactggagctaagcgaggcggaggcgatcggtgctgattcggcgcgatttgaggagctgctgctgcaggcctcgaaggagctccagcaagcccagacaaccagaccagaatcgacacaaatccagcctcagcctggtttctgcataaagaccaactcctcggaagggaaggttttcatcaacatctgccactccccctctatccctcctcccgccgacgtgaccgaggaggagctgcttcagatgctagaggaggaccaagctgggtttcgcatccccatgagtctgggagagcctcatgcagaactggatgcaaaaggccagggatgtaccgcctacgacgtagctgtcaacagcgacttctaccggaggatgcagaacagcgatttcttgcgggagctcgtgatcaccatcgccagggagggccttgaggacatatacaacttgcagctgaatccggaatggcgcatgatgaagaaccggccattcatgggctccatctcgcagcagaacatccgctcggagcagcgtcctcggatccaggagctgggggacctgtacacgcccgcccccgggagagctgagtcagggcctgaaaagcctcacctgaacctgtggctggaagcccccgacctcctcttggccgaagttgacctccccaaactggatggagccctggggctgtcgctggagatcgggagaaccgcctggtgatggggggcccccagcagctgtatcatctagacgcttatatcccgccgcagatcaactctcatgagagcaaggcagccttccaccggaagagaaagcaattaatggtggccatgccgcttctgccggtgccttcttgatcagggtgtctccttgtgcttctgagatgtggagaagaggctgctggcttccctaaaagttgaaataaaagatttttgcctttaaaaaaaaaaaa

SEQ ID NO: 154 - DNA, 1513 bp, Homo sapiens
  CDS 58..1116
  sig_peptide 58..159: Von Heijne matrix score 4 seq IAVLYLHLYDVFG/DP
  polyA_signal 1486..1491
  polyA_site 1504..1513
ctgactcctgagttctcacaacgcttgaccaataagattcgggagcttcttcagcaaatggagagaggcctgaaatcagcagaccctcgggatggcaccggttacactggctgggcaggtattgctgtgctttacttacatctttatgatgtatttggggaccctgcctacctacagttagcacatggctatgtaaagcaaagtctgaactgcttaaccaagcgctccatcaccttcctttgtggggatgcaggccccctggcagtggccgctgtgctatatcataagatgaacaatgagaagcaggcagaagattgcatcacacggctaattcacctaaataagattgatcctcatgctccaaatgaaatgctctatgggcgaataggctacatctatgctcttctttttgtcaataagaactttggagtggaaaagactcctcaaagccatattcagcagatttgtgaaacaattttaacctctggagaaaacctagctaggaagagaaacttcacggcaaagtctccactgatgtatgaatggtaccaggaatattatgtaggggctgctcatggcctggctggaatttattactacctgatgcagcccagccttcaagtgagccaagggaagttacatagtttggtcaagcccagtgtagactacgtctgccagctgaaattcccttctggcaattaccctccatgtataggtgataatcgagatctgcttgtccattggtgccatggcgcccctggggtaatctacatgctcatccaggcctataaggtattcagagaggaaaagtatctctgtgatgcctatcagtgtgctgatgtgatctggcaatatgggttgctgaagaagggatatgggctgtgccacggttctgcagggaatgcctatgccttcctgacactctacaacctcacacaggacatgaagtacctgtatagggcctgtaagtttgctgaatggtgcttagagtatggagaacatggatgcagaacaccagacacccctttctctctctttgaaggaatggctgggacaatatatttcctggctgacctgctagtccccacaaaagccaggttccctgcatttgaactctgaaaggatagcatgccacctgcaactcactgcatgaccctttctgtatattcaaacccaagctaagtgcttccgttgctttccaaggaaacaaagagtcaaactgtggacttgattttgttagcttttttcagaatttatctttcattcagttcccttccattatcatttacttttacttagaagtatccaaggaagtcttttaactttaatttccatttcttcctaaagggagagtgagtgatatgtacagtgttttgagattgtatacatatattccagaacttggaggaaatcttatttaagtttatgaatataaccatctgttactgttctaaaaatgtttaaaagaaactcaatacagataaagataaatatgtgactattaaaaaaaaaa

SEQ ID NO: 155 - DNA, 417 bp, Homo sapiens
  CDS 327..416
  polyA_site 404..417
tgttttgaggtgttggcattcttcgctgatttggctgttcccaatgtttacattatttaatcttgcaaaaatggttctgtgcacttggatgtgaaatgctgtccagttttattttttttatgttgttatccttggatgtacaaaaaattcagaaaatgatctctgtagatattctgttttattttggtcatctttagaagttatcaggaatgtgtttaaaacaagaagagaacttttctaaggaatgatacatagaaaagattttattttaaaatgagttgtaaagcttgtgtttctttgttgctgcaagctatctgcccaagttaatgcaaatggacacattttttatgtcagaaaaacacacacacacacacacacatatacacacacacacacgaaaaacaaaaaaaaaaaaaa

SEQ ID NO: 156 - DNA, 603 bp, Homo sapiens
  CDS 63..398
  sig_peptide 63..206: Von Heijne matrix score 4.9 seq PSLAAGLLFGSLA/GL
ggggccttcgtgagaccggtgcaggcctggggtagtctcctgtctggacagagaagagaaaaatgcaggacactggctcagtagtgcctttgcattggtttggctttggctacgcagcactggttgcttctggtgggatcattggctatgtaaaagcaggcagcgtgccgtccctggctgcagggctgctctttggcagtctagccggcctgggtgcttaccagctgtctcaggatccaaggaacgtttgggttttcctagctacatctggtaccttggctggcattatgggaatgaggttctaccactctggaaaattcatgcctgcaggtttaattgcaggtgccagtttgctgatggtcgccaaagttggagttagtatgttcaacagaccccattagcagaagtcatgttccagcttagactgatgaagaattaaaaatctgcatcttccactattttcaatatattaagagaaataagtgcagcatttttgcatctgacattttacctaaaaaaaaagacaccaaacttggcagagaggtggaaaatcagtcatgattacaaacctacagaggtggcgagtatgtaacacaagagctt

SEQ ID NO: 157 - DNA, 522 bp, Homo sapiens
  CDS 2..163
  polyA_signal 488..493
  polyA_site 511..522
  misc_feature (64..65): unknown
cgagattgcgggctatggcgccgaaggtttttcgtcagtactgggatatccccgatggcaccgattgccaccgcaaagcctacagcaccaccagtattgccagcgtcgctggcctgaccgccgctgcctacagagtcacactcaatcctccgggcaccttcctnntgaaggagtggctaaggttggacaatacacgttcactgcagctgctgtcggggccgtgtttggcctcaccacctgcatcagcgcccatgtccgcgagaagcccgacgaccccctgaactacttccccggtggctgcgccnggaggcctgactctgggagcacgcacgcacaactacgggattggcgccgccgcctgcgtgtactttggcatagcggcctccctggtcaagatgggccggctggagggctgggaggtgtttgcaaaacccaaggtgtgagccctgtgcctgccgggacctccagcctgcagaatgcgtccagaaataaattctgtgtctgtgtgtgaaaaaaaaaaaa

SEQ ID NO: 158 - DNA, 956 bp, Homo sapiens
  CDS 13..465
  sig_peptide 13..75: Von Heijne matrix score 3.9 seq PVAVTAAVAPVLS/IN
ngagtcgggaaaatggctgcgagtacntcnatggncccggtggctgtgacggcggcagtggcgcctgtcctgtccataaacagcgatttctcagatttgcgggaaattaaaaagcaactgctgcttattgcgggccttacccgggagcggggcctactacacagtagcaaatggtcggcggagttggctttctctctccctgcattgcctcntggccagctgcaaccgcctccgcctattacagaggaagatgcccaggatatggatgcctataccctggccaaggcctactttgacgttaaagagtatgatcgggcagcacatttcctgcatggctgcaatagcaagaaagcctattttctgtatatgtattccagatatctggtgagggccattttaaaatgtcattctgcctttagtgaaacatccatatttagaaccaatggaaaagttaaatcttttaaatagcttagcagtgggccactgaatgaatgtactttatacatagcaataataaaaaaaagatatcataaataaagttaaaaaggatggtagagaagaaaatattcttaggaatgactaacaggataagtaacaacctgattatttatttactttaggttatataaggttcttcatgcctgtgaattaatattattgtgtaagaattaagttaaaaagcctgggctgacttttaaatttataaattcatttatcatgtttatagtatatttattgtttttctttcatggctattaaaaagtatgactgtaaaggacaatgcaagnaaaccaacttaatactgtattgaataataagtacaatttattattttactttgaaacattatgaatttactttcctactttttcttagttgttatctatataaattgattaaaaaaacattttatgtacntnncatttcctagtacaggttgagtatcccttatttga

SEQ ID NO: 159 - DNA, 1041 bp, Homo sapiens
  CDS 20..703
  sig_peptide 20..94: Von Heijne matrix score 3.9 seq ATVGLLMLGVTLP/NS
  polyA_signal 1000..1005
  polyA_site 1023..1041
cagggtcctgcatcctaccatgtcgatggctgtggaaacctttggcttcttcatggcaactgtggggctgctgatgctgggggtgactctgccaaacagctactggcgagtgtccactgtgcacgggaacgtcatcaccaccaacaccatcttcgagaacctctggtttagctgtgccaccgactccctgggcgtctacaactgctgggagttcccgtccatgctggccctctctgggtatattcaggcctgccgggcactcatgatcaccgccatcctcctgggcttcctcggcctcttgctaggcatagcgggcctgcgctgcaccaacattgggggcctggagctctccaggaaagccaagctggcggccaccgcaggggccccccacattctggccggtatctgcgggatggtggccatctcctggtacgccttcaacatcacccgggacttcttcgaccccttgtaccccggaaccaagtacgagctgggccccgccctctacctggggtggagcgcctcactgatctccatcctgggtggcctctgcctctgctccgcctgctgctgcggctctgacgaggacccagccgccagcgcccggcggccctaccaggctccagtgtccgtgatgcccgtcgccacctcggaccaagaaggcgacagcagctttggcaaatacggcagaaacgcctacgtgtagcagctctggcccgtgggccccgctgtcttcccactgccccaaggagaggggacctggccggggcccattcccctatagtaacctcaggggccggccacgccccgctcccgtagccccgccccggccacggccccgtgtcttgcactctcatggcccctccaggccaagaactgctcttgggaagtcgcatatctcccctctgaggctggatccctcatcttctgaccctgggttctgggctgtgaaggggacggtgtccccgcacgtttgtattgtgtataaatacattcattaataaatgcatattgtgaccgttaaaaaaaaaaaaaaaaaaa

SEQ ID NO: 160 - DNA, 558 bp, Homo sapiens
  CDS 103..294
  sig_peptide 103..243: Von Heijne matrix score 5.9 seq TWLGLLSFQNLHC/FP
ttcccatggtttagaagcataacctgtaatgtaatgcaagtcccctaactccctggttgctaacattaacttccttaagtaataatcaatgaaagaaattctatgcatggttttgaaataatatccttgaaagaggaatcaccattaggaaaggtgagtcagggtcctttgtttaatgtgactagtggctcatcatcaccagtgacctggttgggcctactctccttccagaacctgcattgcttcccagacctccccactgagatgcctctaagagccaaaggagtcaacacttgagcctagggtgggctacaacaaaagattctaatttaccttgcttcatctaggtccaggccccaagtagcttgctgaaggaacttaaaaagtagctgttatttattgtattgtataagctaaaaacatttatttttgttgaatcgaaacaattccatgtagcaatcttttttctgttcacggtgtttgtgatagaaccttaaattccgcaagcatcagttttttgaaaaaatgggaattgaccggatagtaacaggcaaagtt

SEQ ID NO: 161 - DNA, 730 bp, Homo sapiens
  CDS 81..518
  sig_peptide 81..173: Von Heijne matrix score 3.9 seq ILFHGVFYAGGFA/IV
ctcgtcatgctctttgtagcgtggtgcttctgttgctcacaggacaacttgcctttgatgattttcaagagagttgtgctatgatgtggcaaaagtatgcaggaagcaggcggtcaatgcctctgggagcaaggatccttttccacggtgtgttctatgccgggggctttgccattgtgtattacctcattcaaaagtttcattccagggctttatattacaagttggcagtggagcagctgcagagccatcccgaggcacaggaagctctgggccctcctctcaacatccattatctcaagctcatcgacagggaaaacttcgtggacattgttgatgccaagttgaagattcctgtctctggatccaaatcagagggccttctctacgtccactcatccagaggtggcccctttcagaggtggcaccttgacgaggtctttttagagctcaaggatggtcagcagattcctgtgttcaagctcagtggggaaaacggtgatgaagtgaaaaaggagtagagacgacccagaagacccagcttgcttctagtccatccttccctcatctctaccatatggccactggggtggtggcccatctcagtgacagacactcctgcaacccagttttccagccaccagtgggatgatggtatgtgccagcacatggtaattttggtgtaattctaacttgggcacaacgaatgctatttgtcatttttaaactg

SEQ ID NO: 162 - DNA, 1098 bp, Homo sapiens
  CDS 66..326
  polyA_signal 1066..1071
  polyA_site 1087..1098
ctccctttgaatgagagaaactaacccgcttccgaagcccctgaaagacactgctccttcctctcatggagttggctccgacagcccgtctgccaccaggccatggttccttgccccatggtgtcctgggacccagagcaacaggatctgtcacccacctctctcttctcccccagatcaagcaacgtgcctcagaggctttgcccgaattgcttcgtcctgtcacccccatcaccaattttgagggcagccagtctcaggaccacagtggaatctttggcctggtaacaaacctggaagagctggaggtggacgattgggagttctgagcctctgcaaactgtgcgcattctccagccagggatgcagaggccacccagaggcccttcctgagggccggccacattcccgccctcctgggcagattgggtagaaaggacattcttccaggaaagttgactgctggctgattgggaaagaaaatcctggagagatacttcactgctccaaggcttttgagacacaagggaatctcaacaaccagggatcaggagggtccaaagccgacattcccagtcctgtgagctcaggtgacctcctccgcagaagagagatgctgctctggccctgggagctgaattccaagcccagggtttggctccttaaacccgaggaccgccacctcttcccagtgcttgcgaccagcctcattctacttaactttgctctcagatgcctcagatgctataggtcagtgaaagggcgagtagtaagctgcctgcctcccttccctcagacctctccctcataattccagagaagggcatttctgtctttttaagcacagactaaggctggaacagtccatccttatccctcttctggcttgggccctgacacctaagtctttcccacggtttatgtgtgtgcctcattcctttcccaccaagaatccatcttagcgcctcctgccagctgccctggtgctttctccaagggccatcagtgtcttgcctagcttgagggcttaagtccttatgctgtgttagtttcgttgtcagaacaaattaaaattttcagagacgcaaaaaaaaaaaa

SEQ ID NO: 163 - DNA, 346 bp, Homo sapiens
  CDS 170..289
  sig_peptide 170..250: Von Heijne matrix score 3.6 seq LTLLLITPSPSPL/LF
ccatttgagccccaccacggaggttatgtggtcccaaaaggaatgatggccaagcaattaatttttcctcctagttcttagcttgcttctgcattgattggctttacacaactggcatttagtctgcattacacaaatagacactaatttatttggaacaagcagcaaaatgagaactttatttggtgcagtcagggctccatttagttccctcactctgcttctaatcaccccttctcccagccctcttctatttgatagaggtctgtccctcagatcagcaatgtcttagcccctctcctctcttccattccttcctgttggtactcatttcttctaactttta

SEQ ID NO: 164 - DNA, 685 bp, Homo sapiens
  CDS 36..497
  polyA_signal 650..655
  polyA_site 663..685
aagttctgcgctggtcggcggagtagcaagtggccatggggagcctcagcggtctgcgcctggcagcaggaagctgttttaggttatgtgaaagagatgtttcctcatctctaaggcttaccagaagctctgatttgaagagaataaatggattttgcacaaaaccacaggaaagtcccggagctccatcccgcacttacaacagagtgcctttacacaaacctacggattggcagaaaaagatcctcatatggtcaggtcgcttcaaaaaggaagatgaaatcccagagactgtctcgttggagatgcttgatgctgcaaagaacaagatgcgagtgaagagcagctatctaatgattgccctgacggtggtaggatgcatcttcatggttattgagggcaagaaggctgcccaaagacacgagactttaacaagcttgaacttagaaaagaaagctcgtctgaaagaggaagcagctatgaaggccaaaacagagtagcagaggtatccgtgttggctggattttgaaaatccaggaattatgttataacgtgcctgtattaaaaaggatgtggtatgaggatccatttcataaagtatgatttgcccaaacctgtaccatttccgtatttctgccgtagaagtagaaataaattttcttaaaaaaaaaaaaaaaaaaaaaaa

SEQ ID NO: 165 - DNA, 554 bp, Homo sapiens
  CDS 18..320
  polyA_signal 539..544
  polyA_site 542..554
  misc_feature (278): unknown
aaccgtcgtggggaaggatggtgtgcgaaaaatgtgaaaagaaacttggtactgttatcactccagatacatggaaagatggtgctaggaataccacagaaagtggtggaagaaagctgaataaaaataaagctttgacttcaaaaaaagcaagatttgatccatatggaaagaataagttctccacttgtagaatttgtaaaagttctgtgcaccaaccaggttctcattactgccagggctgtgcctacaaaaaaggcatctgtgcgatgtgtggnaaaaaagttttggataccaaaaactacaagcaaacatctgtctagatgtattgatggaatttctggctttctaaatgattttactttctgccttgaattttcaaggcatagatgtcaacttacagaataacatgttttaagataattaagtttaaaccagagaatttgattgttactcattttgctctcatgttctaaacagcaacagtgtaactagtcttttgttgtaaatggttattttccttataagaattttaagaactaaaaaaaaaaaaa

SEQ ID NO: 166 - DNA, 1678 bp, Homo sapiens
  CDS 71..1438
  sig_peptide 71..136: Von Heijne matrix score 3.5 seq AAPVAAGLGPVIS/RP
  polyA_signal 1644..1649
  polyA_site 1665..1678
ccgacttccagaggagcgctgtgcacgtggagaagagcggggactcggcgaccctgccctcccgaccctcatgttcgaagagcctgagtgggccgaggcggccccagtagccgcgggccttgggcccgtaatctcacgacctccgcctgcggcctcctcgcaaaacaagggctccaagcgccgccagctcttggccacattacgggccctagaggcagcatctctttcccagcatccccccagcctatgtataagtgactctgaggaggaggaggaggaaaggaagaagaaatgccccaaaaaggcatcatttgccagtgcctctgctgaagtagggaagaaagggaagaagaaatgtcaaaaacagggcccaccttgcagtgactctgaggaagaagtagaaaggaagaagaaatgccacaaacaggctcttgttggcagtgactctgctgaagatgagaaaagaaagaggaaatgccagaaacatgcccctataaattcagcccagcacctggacaatgttgaccaaacaggtcccaaagcctggaagggtagtactacaaatgatccaccaaagcaaagccctgggtccacttcccctaaaccccctcatacattaagccgcaagcagtggcggaaccggcaaaagaataagagaagatgtaagaacaagtttcagccacctcaggtgccagaccaggccccagctgaggcccccacagagaagacagaggtgtctcctgttcccaggacagacagccatggggctcgggcaggggctttgcgagcccgcatggcacagcggctggatggggcccgatttcgctacctcaatgaacagttgtactcagggcccagcagtgctgcacagcgtctcttccaggaagaccctgaggcttttcttctctaccaccgcggcttccagagccaagtgaagaagtggccactgcagccagtggaccgcatcgccagggatcttcgccagcggcctgcatccctagtggtggctgacttcggctgtggggattgccgcttggcttcaagtatccggaaccctgtgcattgctttgacttggcttctctggaccctagggtcactgtgtgtgacatggcccaggttcctttggaggatgagtctgtggatgtggctgtgttttgcctttcactgatgggaaccaacatcagggacttcctagaggaggcaaatagagtactgaagccagggggtctcctgaaagtggctgaggtcagcagccgctttgaggatgttcgaacctttctgcgggctgtgaccaagctaggcttcaagattgtctccaaggacctgaccaacagccatttcttcttgtttgatttccaaaagactgggccccctctggtagggcccaaggctcagctttcaggcctgcagcttcagccatgtctctacaagcgcaggtgacctctggatcttccttgagaggggaggcagatctcaaactccaggctcagaactgtgaagactgtttccggcctggctgtgagccaagacctggttcctggtggaccctgaggacaaagtgtgataaaacctctggctcagacttgctctactgaaggcttcttggttataagatgcataaagtcactggggctagctaaacaataaagagtttattgtgaggaaaaaaaaaaaaaa

SEQ ID NO: 167 - DNA, 494 bp, Homo sapiens
  CDS 25..318
  sig_peptide 25..75: Von Heijne matrix score 7.4 seq FFLLLQFFLRIDG/VL
  polyA_signal 452..457
  polyA_site 482..494
aggctgagtgtgaagattagagtaatgccttctagctttttcctgctgttgcagtttttcttgagaattgatggggtgcttatcagaatgaatgacacgagactttaccatgaggctgacaagacctacatgttacgagaatatacgtcacgagaaagcaaaatttctagtttgatgcatgttccaccttccctcttcacggaacctaatgaaatatcccagtatttaccaataaaggaagcagtttgtgagaagctaatatttccagaaagaattgatcctaacccagcagactcacaaaaaagtacacaagtggaataaaatgtgatacaacatatactcactatggaatctgactggacaccttggctatttgtaaggggttatttttattatgagaattaattgccttgtttatgtacagattttctgtagccttaaaggaaaaaaaaataaagatcgttacaggcaggtttcactcaaaaaaaaaaaac

SEQ ID NO: 168 - DNA, 714 bp, Homo sapiens
  CDS 84..332
  sig_peptide 84..170: Von Heijne matrix score 5.2 seq PCYYLGLFQRALA/SV
  polyA_site 702..714
cctatctcttctgctggctgggctcaatgccgcgggtgagcgttcggccgaggctgctcctacccttgagtgatgtgccttgaatgacgctgctttcattcgctgctttcacggctgctttctccgtcctcccctgttactaccttgggctgtttcagcgggcgctcgcgtcggtcttcgacccactttgcgtttgttcacgtgtgctcccgacacctgtatgtaccttggtcgcaacacaagccgaaaaaatattagagaatgggccctgtccaaccaaggaggcggcccagcttgtcgggaagggcagcgtttccgccagaaatgcttcgtgaaaggcacttgagggaccttagcagcatcctcaacaggccttgtagggaatgccagaagaagcagtccttggccgggcggggtggctcatgcctgtggtcccagcactttgggaggccggggcgggcggatcacctgaggtcgggaggtccagaccagcctgaccgacatggagaaaccccgtctntactagaaatacaaaactagccgggtgtggtggcgcatgcctgtagtcccagctactcgggagggtgaggcaggagacgttcttgaacccgggaggcggagtttgtggtgagccgagatcgcgccattgcactccagcctgggcatgccaagagcgaaactccgtctcaaaaaaaaaaaagaaaaaaaaaaaaa

SEQ ID NO: 169 - DNA, 805 bp, Homo sapiens
  CDS 32..718
  sig_peptide 32..100: Von Heijne matrix score 7.4 seq VLLLAALPPVLLP/GA
  polyA_signal 770..775
  polyA_site 793..805
cctctttcagcccgggatcgccccagcagggatgggcgacaagatctggctgcccttccccgtgctccttctggccgctctgcctccggtgctgctgcctggggcggccggcttcacaccttccctcgatagcgacttcacctttacccttcccgccggccagaaggagtgcttctaccagcccatgcccctgaaggcctcgctggagatcgagtaccaagttttagatggagcaggattagatattgatttccatcttgcctctccagaaggcaaaaccttagtttttgaacaaagaaaatcagatggagttcacactgtagagactgaagttggtgattacatgttctgctttgacaatacattcagcaccatttctgagaaggtgattttctttgaattaatcctggataatatgggagaacaggcacaagaacaagaagattggaagaaatatattactggcacagatatattggatatgaaactggaagacatcctggaatccatcagcagcatcaagtccagactaagcaaaagtgggcacatacaaattctgcttagagcatttgaagctcgtgatcgaaacatacaagaaagcaactttgatagagtcaatttctggtctatggttaatttagtggtcatggtggtggtgtcagccattcaagtttatatgctgaagagtctgtttgaagataagaggaaaagtagaacttaaaactccaaactagagtacgtaacattgaaaaatgaggcataaaaatgcaataaactgttacagtcaagaccaaaaaaaaaaaaa

SEQ ID NO: 170 - DNA, 787 bp, Homo sapiens
  CDS 26..481
  sig_peptide 26..88: Von Heijne matrix score 4.4 seq AVASSFFCASLFS/AV
  polyA_signal 755..760
  polyA_site 775..787
gacagcctggataaaggctcacttgatggctcagttgggagcagttgtggctgtggcttccagtttcttttgtgcatctctcttctcagctgtgcacaagatagaagagggacatattggggtatattacagaggcggtgccctgctgacttcgaccagcggccctggtttccatctcatgctccctttcatcacatcatataagtctgtgcagaccacactccagacagatgaggtgaagaatgtaccttgtgggactagtggtggtgtgatgatctactttgacagaattgaagtggtgaacttcctggtcccgaacgcagtgcatgatatagtgaagaactatactgctgactatgacaaggccctcatcttcaacaagatccaccacgaactgaaccagttctgcagtgtgcacacgcttcaagaggtctacattgagctgtttggactggaaaatgatttttcccaggaatcttcataaaagggaccctgagcaagaacatttttcatagcagacaggaggactcatccacatcgccagcaatcataattaagcaaaccgccttttgcaccatttaagatttaggaaatcatccaaattacttttaatgtttctgcagtagaaaatgaatctaaattcattttatagggtttgtagtcttttatctgttttggattcactgtgcttttaagaaaaagttggtaaatttgccgttgatttttctttttaacctcaaactaatagaattttataaaatattaattttctccaaaaaaaaaaaaa

SEQ ID NO: 171 - DNA, 569 bp, Homo sapiens
  CDS 26..562
  sig_peptide 26..187: Von Heijne matrix score 4.1 seq AVVAAAARTGSEA/RV
agaaacaggtctgggctacaaaagtatggccgcttctgaggcggcggtggtgtcttcgccgtctttgaaaacagacacatcccctgtccttgaaactgcaggaacggtcgcagcaatggctgcgaccccgtcagcaagggctgcagccgcggtggttgcggccgcggccaggaccggatccgaagccagggtctccaaggccgctttggctaccaagctgctgtccttgagcggcgtgttcgccgtgcacaagcccaaagggcccacttcagccgagctgctgaatcggttgaaggagaagctgctggcagaagctggaatgccttctccagaatggaccaagaggaaaaagcagactttgaaaattgggcatggagggactctagacagcgcagcccgaggagttctggttgttggaattggaagcggaacaaaaatgttgaccagtatgttgtcagggtccaagaggtatactgccattggagaactggggaaagctactgatacactagattctacggggaaggtaacagaagaaaaaccttacggtatgaacctcatctaagtag

SEQ ID NO: 172 - DNA, 893 bp, Homo sapiens
  CDS 4..810
  sig_peptide 4..279: Von Heijne matrix score 6.8 seq AVMLYTWRSCSRA/IP
  polyA_signal 858..863
  polyA_site 881..893
gccatgatcacgcacgtcaccctggaagatgccctgtccaacgtggacctgcttgaagagcttcccctccccgaccagcagccatgcatcgagcctccaccttcctccatcatgtaccaggctaactttgacacaaactttgaggacaggaatgcatttgtcacgggcattgcaaggtacattgagcaggctacagtccactccagcatgaatgagatgctggaggaaggacatgagtatgcggtcatgctgtacacctggcgcagctgttcccgggccattccccaggtgaaatgcaacgagcagcccaaccgagtagagatctatgagaagacagtagaggtgctggagccggaggtcaccaagctcatgaagttcatgtattttcagcgcaaggccatcgagcggttctgcagcgaggtgaagcggctgtgccatgccgagcgcaggaaggactttgtctctgaggcctacctcctgacccttggcaagttcatcaacatgtttgctgtcctggatgagctaaagaacatgaagtgcagcgtcaagaatgaccactccgcctacaagagggcagcacagttcctgcggaagatggcagatccccagtctatccaggagtcgcagaacctttccatgttcctggccaaccacaacaggatcacccagtgtctccaccagcaacttgaagtgatcccaggctatgaggagctgctggctgacattgtcaacatctgtgtggattactacgagaacaagatgtacctgactcccagtgagaaacatatgctcctcaaggtaaaactcccctgaggccgcacccatggagcctgggcttaccctctcaccttcttcttattaaaaatccgttttaaaaaacaaaaaaaaaaaaa

SEQ ID NO: 173 - DNA, 1475 bp, Homo sapiens
  CDS 55..459
  sig_peptide 55..120: Von Heijne matrix score 7.2 seq GLWLALVDGLVRS/SP
  polyA_signal 1444..1449
  polyA_site 1462..1475
cagttccgcagctacgtgtgggacccgctgctgatcctgtcgcagatcgtcctcatgcagaccgtgtattacggctcgctgggcctgtggctggcgctggtggacgggctagtgcgaagcagcccctcgctggaccagatgttcgacgccgagatcctgggcttttccacccctccaggccggctctccatgatgtccttcatcttcaacgccctcacctgtgccctgggcttgctgtacttcatccggcgaggaaagcagtgtctggatttcactgtcactgtccatttctttcacctcctgggctgctggttctacagctcccgtttcccctcggcgctgacctggtggctggtccaagccgtgtgcattgcactcatggctgtcatcggggagtacctgtgcatgcggacggagctcaaggagatacccctcaactcagcccctaaatccaatgtctagaatcaggccctttggacatcccgctgacacttgggccccttaacaccttgggctgctcagaccctccagatgaggtccagcccagatctgagaggaaccctggaaatgtgaagtctctgttggtgtgggagagatagtgagggcctgtcaaagaaggcaggtagcagtcagcatgacagctgcaagaatgacctctgtctgttgaagccttggtatctgagaggtcaggaaggggacctctttgagggtaataacataattggaaccatgccactcttgagccacaatacctgtcaccagcctgttgttttaagagagaaaaaaaatcaaggatatctgattggagcaaaccacttctttagtcatctgtcttacctccctgggacagctgttacctttgcagtgttgccgaatcacagcagttacctttgcaatgttgccgaatcacagcagttctgttggagaaacgcttggtttccggatccagagccacagaaagaaatgtaggtgtgaagtattaggctgctgtcagggagaggatggcagatggaggcatcaagcacaaggaaaatgcacaacctgtgccctgttatacacacgttcatgtgcgcccaagaacctatgactttcttccagttccttctaccaggtccccatcctgctgccagctctcaacatagcaggccataggacccagagaagaatcccagtgttgctcaaagtctgaccatcataaagacactgcctgtcttctaggaatgaccaggcacccagctcccactggactccaattttttttcctgccttatttagaattctttggcgggaagggtatgatgggttcccagagacaagaagcccaaccttctggcctgggctgtgctgatagtgctgagggagataggaatttgctgctaagatttttctttggggtggagtttcctctgtgaggggcttgcagctatccttcctgtgtatacaaatacagtattttccatgaaaaaaaaaaaaaa

SEQ ID NO: 174 - DNA, 321 bp, Homo sapiens
  CDS 48..248
  sig_peptide 48..161: Von Heijne matrix score 6.3 seq LVFALVTAVCCLA/DG
  polyA_signal 283..288
  polyA_site 308..321
gctgagaagagttgagggaaagtgctgctgctgggtctgcagacgcgatgaataacgtgcagccgaaaataaaacatcgccccttctgcttcagtgtgaaaggccacgtgaagatgctgcggctggtgtttgcacttgtgacagcagtatgctgtcttgccgacggggcccttatttaccggaagcttctgttcaatcccaacggtccttaccagaaaaagcctgtgcatgaaaaaaaagaagttttgtgattttatattactttttagtttgatactaagtattaaacatatttctgtattcttccaaaaaaaaaaaaaa

SEQ ID NO: 175 - DNA, 450 bp, Homo sapiens
  CDS 25..399
  sig_peptide 25..186: Von Heijne matrix score 3.5 seq SILAQVLDQSARA/RL
ctgctccagcgctgacgccgagccatggcggacgaggagcttgaggcgctgaggagacagaggctggccgagctgcaggccaaacacggggatcctggtgatgcggcccaacaggaagcaaagcacagggaagcagaaatgagaaacagtatcttagcccaagttctggatcagtcggcccgggccaggttaagtaacttagcacttgtaaagcctgaaaaaactaaagcagtagagaattaccttatacagatggcaagatatggacaactaagtgagaaggtatcagaacaaggtttaatagaaatccttaaaaaagtaagccaacaaacagaaaagacaacaacagtgaaattcaacagaagaaaagtaatggactctgatgaagatgacgattattgaactacaagtgctcacagactagaacttaacggaacaagtctaggacag

SEQ ID NO: 176 - DNA, 1173 bp, Homo sapiens
  CDS 10..1137
  sig_peptide 10..72: Von Heijne matrix score 6.5 seq LLTLLLPPPPLYT/RH
  polyA_signal 1144..1149
  polyA_site 1162..1173
gagctgcttatgggacaccgcttcctgcgcggcctcttaacgctgctgctgccgccgccacccctgtatacccggcaccgcatgctcggtccagagtccgtcccgcccccaaaacgatcccgcagcaaactcatggcaccgccccgaatcgggacgcacaatggcaccttccactgcgacgaggcactggcatgcgcactgcttcgcctcctgccggagtaccgggatgcagagattgtgcggacccgggatcccgaaaaactcgcttcctgtgacatcgtggtggacgtggggggcgagtacgaccctcggagacaccgatatgaccatcaccagaggtctttcacagagaccatgagctccctgtcccctgggaggccgtggcagaccaagctgagcagtgcgggactcatctatctgcacttcgggcacaagctgctggcccagttgctgggcactagtgaagaggacagcatggtgggcaccctctatgacaagatgtatgagaactttgtggaggaggtggatgctgtggacaatgggatctcccagtgggcagagggggagcctcgatatgcactgaccactaccctgagtgcacgagttgctcgacttaatcctacctggaaccaccccgaccaagacactgaggcagggttcaagcgtgcaatggatctggttcaagaggagtttctgcagagattagatttctaccaacacagctggctgccagcccgggccttggtggaagaggcccttgcccagcgattccaggtggacccaagtggagagattgtggaactggcgaaaggtgcatgtccctggaaggagcatctctaccacctggaatctgggctgtcccctccagtggccatcttctttgttatctacactgaccaggctggacagtggcgaatacagtgtgtgcccaaggagccccactcattccaaagccggctgcccctgccagagccatggcggggtcttcgggacgaggccctggaccaggtcagtgggatccctggctgcatcttcgtccatgcaagcggcttcattggcggtcaccgcacccgagagggtgccttgagcatggcccgtgccaccttggcccagcgctcatacctcccacaaatctcctagtctaataaaaccttccatctcaaaaaaaaaaaa

SEQ ID NO: 177 - DNA, 785 bp, Homo sapiens
  CDS 72..704
  sig_peptide 72..161: Von Heijne matrix score 13.2 seq LLLLSTLVIPSAA/AP
  polyA_signal 772..777
cggaatccgggagtccggtgacccgggctgtggtctagcataaaggcggagcccagaagaaggggcggggtatgggagaagcctccccacctgcccccgcaaggcggcatctgctggtcctgctgctgctcctctctaccctggtgatcccctccgctgcagctcctatccatgatgctgacgcccaagagagctccttgggtctcacaggcctccagagcctactccaaggcttcagccgacttttcctgaaaggtaacctgcttcggggcatagacagcttattctctgcccccatggacttccggggcctccctgggaactaccacaaagaggagaaccaggagcaccagctggggaacaacaccctctccagccacctccagatcgacaaggtacccaggatggaggagaaggaggccctggtacccatccagaaggccacggacagcttccacacagaactccatccccgggtggccttctggatcattaagctgccacggcggaggtcccaccaggatgccctggagggcggccactggctcagcgagaagcgacaccgcctgcaggccatccgggatggactccgcaaggggacccacaaggacgtcctagaagaggggaccgagagctcctcccactccaggctgtccccccgaaagacccacttactgtacatcctcaggccctctcggcagctgtaggggtggggaccggggagcacctgcctgtagcccccatcagaccctgccccaagcaccatatggaaataaagttctttc

SEQ ID NO: 178 - DNA, 559 bp, Homo sapiens
  CDS 44..505
  sig_peptide 44..223: Von Heijne matrix score 4 seq LVRRTLLVAALRA/WM
agcaaccagagggagatgatcacctgaaccactgctccaaaccatgggcagtaaatgctgtaaaggtggtccagatgaagatgcagtagaaagacagaggcggcagaagttgcttcttgcacaactgcatcacagaaaaagggtgaaggcagctgggcagatccaggcctggtggcgtggggtcctggtgcgcaggaccctgctggttgctgccctcagggcctggatgattcagtgctggtggaggacgttggtgcagagacggatccgtcagcggcggcaggccctgttgagggtctacgtcatccaggagcaggcgacggtcaagctccagtcctgcatccgcatgtggcagtgccggcaatgttaccgccaaatgtgcaatgctctctgcttgttccaggtcccagagagcagccttgccttccagactgatggctttttacaggtccaatatgcaatcccttcaaagcagccagagttccacattgaaatcctatcaatctgaaaggcctggggcatggagaacaggctgcactaccctaataaatgtctgacc

SEQ ID NO: 179 - DNA, 770 bp, Homo sapiens
  CDS 25..393
  sig_peptide 25..150: Von Heijne matrix score 4.6 seq LDPAVSLSAPAFA/SA
  polyA_signal 734..739
  polyA_site 757..770
cgcagaaaggagagacacacatacatgaaaggaggagctttctccaatcttaatgattcccagctctcagcctcgtttctgcaacccagcctgcaagcaaactgtcctgctttggaccctgctgtgtcactctccgcaccagcctttgcctctgctcttcgctctatgaagtcctcccaggctgcacggaaggacgactttctcaggtctcttagtgatggagactcagggacatcagaacacatctcagcggtggtgactagccctcggatttcctgccatggtgctgccattcccaccgcccgtgccctctgcctaggctgttcctgctgcaccgaacgcctcctcctgccaccgccctccctcctttctttagaagcccctgccagcacctgagctctctgctgattgctgttcctcccagtctgtggaagctttgcccatatgctttccttaaaagggttctgggcagggcaggcgcccccatttctcagggatcccctccaggacaacgccttttccttgtgtcttcagctctccttaccagatatctatatatttgtatatattcagtttcaccaacaatgcatcaagtacttttttttttaagtaaagaaccgcagtcatcgaactggagccccattgattccctccccctcgcctccccaaatctggcacctgcccaaggtatcctcagaaccatttggggtgtcctttggcattggataatagaaataaaattttacctctttctacaaaaaaaaaaaaac

SEQ ID NO: 180 - DNA, 1213 bp, Homo sapiens
  CDS 58..1095
  sig_peptide 58..114: Von Heijne matrix score 5.4 seq LSHLLPSLRQVIQ/EP
  polyA_site 1202..1213
cctggctttgcctttgccctgctgtgtgatcttagctccctgcccaggcccacagccatggccatggcccagaaactcagccacctcctgccgagtctgcggcaggtcatccaggagcctcagctatctctgcagccagagcctgtcttcacggtggatcgagctgaggtgccgccgctcttctggaagccgtacatctatgcgggctaccggccgctgcatcagacctggcgcttctatttccgcacgctgttccagcagcacaacgaggccgtgaatgtctggacccacctgctggcggccctggtactgctgctgcggctggccctctttgtggagaccgtggacttctggggagacccacacgccctgcccctcttcatcattgtccttgcctctttcacctacctctccctcagtgccttggctcacctcctgcaggccaagtctgagttctggcattacagcttcttcttcctggactatgtgggggtggccgtgtaccagtttggcagtgccttggcacacttctactatgctatcgagcccgcctggcatgcccaggtgcaggctgtttttctgcccatggctgcctttctcgcctggctttcctgcattggctcctgctataacaagtacatccagaaaccaggcctgctgggccgcacatgccaggaggtgccctccgtcctggcctacgcactggacattagtcctgtggtgcatcgtatcttcgtgtcctccgaccccaccacggatgatccagctcttctctaccacaagtgccaggtggtcttctttctgctggctgctgccttcttctctaccttcatgcccgagcgctggttccctggcagctgccatgtcttcgggcagggccaccaacttttccatatcttcttggtgctgtgcacgctggctcagctggaggctgtggcactggactatgaggcccgacggcccatctatgagcctctgcacacgcactggcctcacaacttttctggcctcttcctgctcacggtgggcagcagcatcctcactgcattcctcctgagccagctggtacagcgcaaacttgatcagaagaccaagtgaagggggatggcatctggtagggagggaggtatagttgggggacaggggtctgggtttggctccaagtgggaacaaggcctggtaaagttgtttgtgtctggccaaaaaaaaaaaa

SEQ ID NO: 181 - DNA, 1318 bp, Homo sapiens
  CDS 31..660
  sig_peptide 31..90: Von Heijne matrix score 5.4 seq AFVIACVLSLIST/IY
  polyA_signal 1288..1293
  polyA_site 1307..1318
ggaggatgggcgagcagtctgaatgccagaatggataaccgttttgctacagcatttgtaattgcttgtgtgcttagcctcatttccaccatctacatggcagcttccattggcacagacttctggtatgagtatcgaagtccagttcaagaaaattccagtgatttgaataaaagcatctgggatgaattcattagtgatgaggcagatgaaaagacttataatgatgcactttttcgatacaatggcacagtgggattgtggagacggtgtatcaccatacccaaaaacatgcattggtatagcccaccagaaaggacagagtcatttgatgtggtcacaaaatgtgtgagtttcacactaactgagcagttcatggagaaatttgttgatcccggaaaccacaatagcgggattgatctccttaggacctatctttggcgttgccagttccttttaccttttgtgagtttaggtttgatgtgctttggggctttgatcggactttgtgcttgcatttgccgaagcttatatcccaccattgccacgggcattctccatctccttgcagtgacaaaggagagcatgcttccagctggagctgagtccaagcacacagccactcctgcacacgcatgcgtgcaaacagggaagcccaagtaggagaagaggaaagaggttgtagggatttgggaagaaccttgattattccctggaggaaaagacaaatctacttccctgaaatcaccctcgaatctacttccaccctcagaacttaaaatgaactgcatcctttttttcatcttcttttcttctccagtgaatatgatctccaaacccttattttttctttgaactgtaaaatttccactcatggacgatgcaaccaacagatgcaatctctgagaagatgaaaattgggacctcttattataaaattgacctagctggactcaggaaaccagggaagaagtcaatgcaggcatttaaaatgtaaagttttttctggttaaatctatttatttttcttgtaggttgagtatttcttcccagtttttctgctctggtgtataacaaacaggtcaaaatttcccatctttcctcctgatagtagttgaatcctaccttgcatacttaatgcatagtgaaatggcatctagcagaaatacacacccccaaaacacaccaccatttcattaggtgcccaaaaaattctgtatttagcttatttatttattgttatttttgctttttcttaacccactatatattgactgcaaacgaattaataaattatcccttctggaaaaaaaaaaaa

SEQ ID NO: 182 - DNA, 853 bp, Homo sapiens
  CDS 31..582
  sig_peptide 31..90: Von Heijne matrix score 5.4 seq AFVIACVLSLIST/IY
  polyA_signal 816..821
  polyA_site 840..853
ggaggatgggcgagcagtctgaatgccagaatggataaccgttttgctacagcatttgtaattgcttgtgtgcttagcctcatttccaccatctacatggcagcctccattggcacagacttctggtatgaatatcgaagtccagttcaagaaaattccagtgatttgaataaaagcatctgggatgaattcattagtgatgaagcagatgaaaagacttataatgatgcaccttttcgatacaatggcacagtgggattgtggagacggtgtatcaccatacccaaaaacatgcattggtatagcccaccagaaaggacagagtcatttgatgtggtcacaaaatgtgtgagtttcacactaactgagcagttcatggagaaatttgttgatcccggaaaccacaatagcgggattgatctccttaggacctatctttggcgttgccagttccttttaccttttgtgagtttaggtttgatgtgctttggggctttgatcggactttgtgcttgcatttgccgaagcttatatcccaccattgccacgggcattctccatctccttgcagataccatgctgtgaagtccaggccacatggaggtgtcctgtgtagatgctccagctgaaatcccaagctaagctcccaactgacagccaacatcatttccagccatgtgtgggagccatcctggatgtccagccttaacaagccttcagaggacttcagccacagctattatcttactacatccttgtgagactctaataaagaaccaactagctgagcccaatcaacctatggaactgatagaaataaaatgaattgttgttttgcgaaaaaaaaaaaaaa

SEQ ID NO: 183 - DNA, 826 bp, Homo sapiens
  CDS 15..695
  sig_peptide 15..80: Von Heijne matrix score 8.5 seq AALLLGLMMVVTG/DE
  polyA_signal 795..800
  polyA_site 814..826
aaccagaggtgcccatgggttggacaatgaggctggtcacagcagcactgttactgggtctcatgatggtggtcactggagacgaggatgagaacagcccgtgtgcccatgaggccctcctggacgaggacaccctcttttgccagggccttgaagttttctacccagagttggggaacattggctgcaaggttgttcctgattgtaacaactacagacagaagatcacctcctggatggagccgatagtcaagttcccgggggccgtggacggcgcaacctatatcctggtgatggtggatccagatgcccctagcagagcagaacccagacagagattctggagacattggctggtaacagatatcaagggcgccgacctgaagaaagggaagattcagggccaggagttatcagcctaccaggctccctccccaccggcacacagtggcttccatcgctaccagttctttgtctatcttcaggaaggaaaggtcatctctctccttcccaaggaaaacaaaactcgaggctcttggaaaatggacagatttctgaaccgtttccacctgggcgaacctgaagcaagcacccagttcatgacccagaactaccaggactcaccaaccctccaggctcccagagaaagggccagcgagcccaagcacaaaaaccaggcggagatagctgcctgctagatagccggctttgccatccgggcatgtggccacactgcccaccaccgacgatgtgggtatggaaccccctctggatacagaaccccttcttttccaaataaaaaaaaaatcatccaaaaaaaaaaaaa

SEQ ID NO: 184 - DNA, 571 bp, Homo sapiens
  CDS 74..295
  sig_peptide 74..196: Von Heijne matrix score 5.4 seq RLLYIGFLGYCSG/LI
  polyA_signal 545..550
  polyA_site 561..571
cgggtagtggtcgtcgtggttttccttgtagttcgtggtctgagaccaggcctcaagtggaaacggcgtcaccatgatcgcacggcggaacccagtacccttacggtttctgccggatgaggcccggagcctgcccccgcccaagctgaccgacccgcggctcctctacatcggcttcttgggctactgctccggcctgattgataacctgatccggcggaggccgatcgcgacggctggtttgcatcgccagcttctatatattacggccttttttttgctggatattatcttgtaaaacgtgaagactacctgtatgctgtgagggaccgtgaaatgtttggatatatgaaattacatccagaggattttcctgaagaagataagaaaacatatggtgaaatttttgaaaaattccatccaatacgttgaagtcttcaaaatgcttgctccagtttcactgatacctgctgttcctgaatttgatggaacatgtttcttatgacagttgaagcttatgctaatctgtatgttgacaccttgtaattaaaatacgtaccaaaaaaaaaaa

SEQ ID NO: 185 - DNA, 659 bp, Homo sapiens
  CDS 440..658
  polyA_signal 601..606
cgccttacgagctgggaggtggtgcctctcacccagctaattgctctctagcccttggccttcacaggtgttggtgcctgccgtgaacgcattctgacctgggccgtatctgtctcccaagactttgtgcctatggttggggacagagtgaggtcgttgccttgacgacgacagcatgcggcccgtggtcctcctaagtgtgagcttgcggcggaccgaggcccacctgcctccctgcctgcttcgcccaggactcgtgactgcgtccgcagaagaaatcacaacagcgctggaattgctagtttgctaggcagcatcttttggacctgcgaaccatatgcatttcacctcaaatctgtttccaagttgaaaacctttgggtctttctatgcgaacggattgaagaaacgcaaaaagtttctacggactttaaattaaaatggaaaaatatgaaaacctgggtttggttggagaagggagttatggaatggtgatgaagtgtaggaataaagatactggaagaattgtggccataaagaagttcttagaaagtgacgatgacaaaatggttaaaaagattgcaatgcgagaagtcaagttactaaagcaacttaggcatgaaaacttggtgaatctcttggaagtgtgtaaaaaaaaaa

SEQ ID NO: 186 - DNA, 301 bp, Homo sapiens
  CDS 38..283
  sig_peptide 38..85: Von Heijne matrix score 4.1 seq LLPATSLAGPVLS/TL
  polyA_signal 257..262
cacctgaatcccaggaaccctcaatgaggtcttcaagatgaagagactgctgccagctaccagcctggctggccctgtcctgtccaccctcattgccccaactcccatgttgttttgtgaagataaaagctgggatctttttcttttttttaagtctcacaagacatggggcatctccacaaatttaagttcctgtccatttggaaatttgtttctatgtgtacagtttgtcagagaaaaacaaagtttttgtatgaatacagaatgtgatttacgcaagaattgacaaaaaaaaaaaaaa

SEQ ID NO: 187 - DNA, 477 bp, Homo sapiens
  CDS 121..477
  sig_peptide 121..288: Von Heijne matrix score 3.5 seq SSCADSFVSSSSS/QP
cctcggagcaggcggagtaaagggacttgagcgagccagttgccggattattctatttcccctccctctctcccgccccgtatctcttttcacccttctcccaccctcgctcgcgtagccatggcggagccgtcggcggccactcagtcccattccatctcctcgtcgtccttcggagccgagccgtccgcgcccggcggcggcgggagcccaggagcctgccccgccctggggacgaagagctgcagctcctcctgtgcggattcctttgtttcttcctcttcctctcagcctgtatctctattttcgacctcacaagagggattgagctctctttgctctgatgagccatcttcagaaattatgacttcttcctttctttcatcttctgaaatacataacactggccttacaatactacatggagaaaaaagccatgtgttagggagccagcctattttagccaaaaaaaaaaaa

SEQ ID NO: 188 - DNA, 323 bp, Homo sapiens
  CDS 2..163
  polyA_signal 292..297
  polyA_site 310..323
agctttcgtgtgggagccagctatggtgcggatcaatgcgctgacagcagcctctgaggctgcgtgcctgatcgtgtctgtagatgaaaccatcaagaacccccgctcgactgtggatgctcccacagcagcaggccggggccgtggtcgtggccgcccccactgagaggcaccccacccatcacatggctggctggctgctgggtgcacttaccctccttggcttggttacttcattttacaaggaaggggtagtaattggcccactctcttcttactggaggctatttaaataaaatgtaagacttcaaaaaaaaaaaaaa

SEQ ID NO: 189 - DNA, 1392 bp, Homo sapiens
  CDS 46..675
  sig_peptide 46..87: Von Heijne matrix score 5.3 seq LTLLGLSFILAGL/IV
  polyA_signal 1364..1369
  polyA_site 1383..1392
ctccgagttgccacccaggaaaaagagggctcctctgggagatgtatgcttactctcttaggcctttcattcatcttggcaggacttattgttggtggagcctgcatttacaagtacttcatgcccaagagcaccatttaccgtggagagatgtgcttttttgattctgaggatcctgcaaattcccttcgtggaggagagcctaacttcctgcctgtgactgaggaggctgacattcgtgaggatgacaacattgcaatcattgatgtgcctgtccccagtttctctgatagtgaccctgcagcaattattcatgactttgaaaagggaatgactgcttacctggacttgttgctggggatctgctatctgatgcccctcaatacttctattgttatgcctccaaaaaatctggtagagctctttggcaaactggcgagtggcagatatctgcctcaaacttatgtggttcgagaagacctagttgctgtggaggaaattcgtgatgttagtaaccttggcatctttatttaccaactttgcaataacagaaagtccttccgccttcgtcgcagagacctcttgctgggtttcaacaaacgtgccattgataaatgctggaagattagacacttccccaacgaatttattgttgagaccaagatctgtcaagagtaagaggcaacagatagagtgtccttggtaataagaagtcagagatttacaatatgactttaacattaaggtttatgggatactcaagatatttactcatgcatttactctattgcttatgctttaaaaaaaggaaaaaaaaaaaactactaaccactgcaagctcttgtcaaattttagtttaattggcattgcttgttttttgaaactgaaattacatgagtttcattttttctttgcatttatagggtttagatttctgaaagcagcatgaatatatcacctaacatcctgacaataaattccatccgttgttttttttgtttgtttgttttttcttttcctttaagtaagctctttattcatcttatggtggagcaattttaaaatttgaaatattttaaattgtttttgaactttttgtgtaaaatatatcagatctcaacattgttggtttcttttgtttttcattttgtacaactttcttgaatttagaaattacatctttgcagttctgttaggtgctctgtaattaacctgacttatatgtgaacaattttcatgagacagtcatttttaactaatgcagtgattctttctcactactatctgtattgtggaatgcacaaaattgtgtaggtgctgaatgctgtaaggagtttaggttgtatgaattctacaaccctataataaattttactctatacaaaaaaaaaa

SEQ ID NO: 190 - DNA, 999 bp, Homo sapiens
  CDS 62..385
  polyA_signal 974..979
  polyA_site 987..999
cctgaatgacttgaatgtttccccgcctgagctaacagtccatgtgggtgattcagctctgatgggatgtgttttccagagcacagaagacaaatgtatattcaagatagactggactctgtcaccaggagagcacgccaaggacgaatatgtgctatactattactccaatctcagtgtgcctattgggcgcttccagaaccgcgtacacttgatgggggacatcttatgcaatgatggctctctcctgctccaagatgtgcaagaggctgaccagggaacctatatctgtgaaatccgcctcaaaggggagagccaggtgttcaagaaggcggtggtactgcatgtgcttccagaggagcccaaaggtacgcaaatgcttacttaaagaggggccaaggggcaagagctttcatgtgcaagaggcaaggaaactgattatcttgagtaaatgccagcctttgggctaagtacttaccacagagtgaatcttcaaaaaatgatcataattatttcagtcaataaaaatagagttattttattaaataaaatattgataattattgtattattactttaaacacacttccccctcacaaaagccctgtgaaggatgttttgttcacatatatgtccaaatatgttttggacacatatttattaaatggaataaatagtacttgaaccctggcacctctgacaacaaagtccatgttctttttactatgccctaatacctttcatcagttatccacattgatgctacatctgtattttataggtaccctatgttaggtgttctgggggatagaaaagaaataagcaggccaggctcagtggctcatgcctgtaatcctagcattttgggaggctgaggcagcagaactgcctgagccccagggttcaagactgcagtgagctatgatggcaccactgcattctagcctgggtgacagagcaagactctgtctaaaataaaaaaagagaaaaaaaaaaaaa

SEQ ID NO: 191 - DNA, 725 bp, Homo sapiens
  CDS 422..550
  sig_peptide 422..475: Von Heijne matrix score 4.5 seq LRWLMPVIPALWG/AE
  polyA_site 714..725
tctgcgagggtgggagagaaaattagggggagaaaggacagagagagcaactaccatccatagccagataggtgagtaaatatatttgcagtaacctatttgctattccttgctgcaactgtgtttaatgttccttccagaatcagagagagtattgccatccaagaaatcgtttttagatatgacatttgagctatcatcttgagaccaatacctaaaacaatttcagtttaagaaatgtctaggtatggtgaaaacacagtttaaaaccagcaaaacagaatttattgccctcagcgaatacccacaatgtacatataccttgtatttctgaaagcaaagcaagcatgccaagtagtttttatttacctgtacctataatacagcaaggtgaaacaggatatatttttgaagtttaaaaatgtcttcaggccggctgcggtggctcatgcctgtaatcccagcactttggggagccgagaagggtgaatcacctgaggtcagcagttttgagaccaggctggccaacatggcgaaaccctgtctctactgaaaatacaaaaattagctgggtgtggtggcgggcgcctgtagtcccagctacttgggagactgaggcaggagaattgcttgaacacggaaggcggaagttgcagtaagctgagatcgtgccaccgcacaccagcttgggcaacagagtgagactccctctcaaaaaaaaaaaa

SEQ ID NO: 192 - DNA, 400 bp, Homo sapiens
  CDS 124..231
  polyA_site 387..400
ctcgcctctcctggcttctggtatgcaccagcaattcctggcgttccttggctcctagaagcatcactcctatcacatggtcatcttcaccctgtgtgtcttcacactaccctttctctgtgcatgtctgcccgaatccctttttataaggacaccagtcagattagattagggtctaccataatacctcattttaacttaatcacctttgtaaagacctttttccaaatatagtcactctctgaggtactgatggttaggatctcaacataccttttttgggaggacacaattgaacccataacagggtgtttgcaaggaagagttaaaatttgaaagaaaggtggtatttgcttagatagatagggcacagctttctaggtgacaaaaaaaaaaaaaa

SEQ ID NO: 193 - DNA, 1053 bp, Homo sapiens
  CDS 131..1051
  sig_peptide 131..169: Von Heijne matrix score 4.2 seq MLAVSLTVPLLGA/MM
  polyA_signal 1019..1024
gagcgaggcggacgggctgcgacagcgccggcccctgcggccgcaggtcgtcacagacgatgatggccaggccccggaggctaaggacggcagctcctttagcggcagagttttccgagtgaccttcttgatgctggctgtttctctcaccgttcccctgcttggagccatgatgctgctggaatctcctatagatccacagcctctcagcttcaaagaacccccgctcttgcttggtgttctgcatccaaatacgaagctgcgacaggcagaaaggctgtttgaaaatcaacttgttggaccggagtccatagcacatattggggatgtgatgtttactgggacagcagatggccgggtcgtaaaacttgaaaatggtgaaatagagaccattgcccggtttggttcgggcccttgcaaaacccgagatgatgagcctgtgtgtgggagacccctgggtatccgtgcagggcccaatgggactctctttgtggccgatgcatgcaagggactatttgaagtaaatccctggaaacgtgaagtgaaactgctgctgtcctccgagacacccattgaggggaagaacatgtcctttgtgaatgatcttacagtctctcaggatgggaggaagatttatttcaccgattctagcagcaaatggcaaagacgagactacctgcttctggtgatggagggcacagatgacgggcgcctgctggagtatgatactgtgaccagggaagtaaaagttttattggaccagctgcggttcccgaatggagtccagctgtctcctgcagaagactttgtcctggtggcagaaacaaccatggccaggatacgaagagtctacgtttctggcctgatgaagggcggggctgatctgtttgtggagaacatgcctggatttccagacaacatccggcccagcagctctggggggtactgggtgggcatgtcgaccatccgccctaaccctgggttttccatgctggatttcttatctgagagaccctggattaaaaggatgatttttaaggcaaaaaaaaaaaa

SEQ ID NO: 194 - DNA, 1128 bp, Homo sapiens
  CDS 86..403
  sig_peptide 86..181: Von Heijne matrix score 8.8 seq VPMLLLIVGGSFG/LR
  polyA_signal 1097..1102
  polyA_site 1117..1128
cgtcttggtgagagcgtgagctgctgagatttgggagtctgcgctaggcccgcttggagttctgagccgatggaagagttcactcatgtttgcacccgcggtgatgcgtgcttttcgcaagaacaagactctcggctatggagtccccatgttgttgctgattgttggaggttcttttggtcttcgtgagttttctcaaatccgatatgatgctgtgaagagtaaaatggatcctgagcttgaaaaaaaactgaaagagaataaaatatctttagagtcggaatatgagaaaatcaaagactccaagtttgatgactggaagaatattcgaggacccaggccttgggaagatcctgacctcctccaaggaagaaatccagaaagccttaagactaagacaacttgactctgctgattcttttttccnnntttttttttttttaaataaaaatactattaactggacttcctaatatatacttctatcaagtggaaaggaaattccaggcccatggaaacttggatatgggtaatttgatgacaaataatcttcactaaaggtcatgtacaggtttttatacttcccagctattccatctgtggatgaaagtaacaatgttggccacgtatattttacacctcgaaataaaaaatgtgaatactgctccaaaaaaaaaaaccagtaccgtgtagtctctctcgtggcttggatttacactgggcaacgtggttggaatgtatctggctcagaactatgatataccaaacctggctaaaaaacttgaagaaattaaaaaggacttggatgccaagaagaaaccccctagtgcatgagactgcctccagcactgccttcaggatataccgattctactgctcttgagggcctcgtttactatctgaaccaaaagcttttgttttcgtctccagcctcagcacttctcttctttgctagaccctgtgttttttgctttaaagcaagcaaaatggggccccaatttgagaactacccgacgtttccaacatactcacctcttcccataatccctttccaactgcatgggaggttctaagactggaattatggtgctagattagtaaacatgacttttaacgaaaaaaaaaaaa

SEQ ID NO: 195 - DNA, 254 bp, Homo sapiens
  CDS 37..162
  sig_peptide 37..93: Von Heijne matrix score 9.5 seq LMCLSLCTAFALS/KP
  polyA_signal 224..229
  polyA_site 243..254
tgtgctgtgggggctacgaggaaagatctaattatcatggacctgcgacagtttcttatgtgcctgtccctgtgcacagcctttgccttgagcaaacccacagaaaagaaggaccgtgtacatcatgagcctcagctcagtgacaaggttcacaatgatatttgatagaaccaattgttgtacataaaacagatctgcgcatatatatatatgtataaaaaataataaaataatggaagatgaaaaaaaaaaaa

SEQ ID NO: 196 - DNA, 886 bp, Homo sapiens
  CDS 31..381
  sig_peptide 31..90: Von Heijne matrix score 5.4 seq AFVIACVLSLIST/IY
  polyA_site 875..886
ggaggatgggcgagcagtctgaatggcagaatggataaccgttttgctacagcatttgtaattgcttgtgtgcttagcctcatttccaccatctacatggcagcctccattggcacagacttctggtatgaatatcgaagtccagttcaagaaaattccagtgatttgaataaaagcatctgggatgaattcattagtgatgaggcagatgaaaagacttataatgatgcactttttcgatacaatggcacagtgggattgtggggacggtgtatcaccatacccaaaaacatgcattggtatagcccaccagaaaggacaggtatttctcttattttaacttctgtcttcttcacctggttaataatagacaaaacgacgtaatgattgcccaattacatgtaagcaggtttgttggttctctctctccttaaagaaataaatcgtgtatcttctctttctactgccttctctccccaacttctttgcattaccatggtactcatcaatattggttggatgaggaacttttcttatcttgggaaagccttaatggcttttttttttcttatttactcactcattaaaatacttttcattactctaacacatgttataaagaaatagttggaaaagtgcatcgaaagacttttaaaaatatttggtaactagtaaaaggactaccatcgaaaatcaactcaaaaaattgtccttttatgggttagctgtattataatacatatctatcatttgcccctgtgtcttagaggatataatttgaccagctctacatttaatctgtgtaattatgagactgttttacaacaatcttgatgcagagttggtaggttaagaaatttgtattacagaagttaaaaaaaaaaaa

SEQ ID NO: 197 - DNA, 1244 bp, Homo sapiens
  CDS 46..579
  sig_peptide 46..156: Von Heijne matrix score 3.5 seq LVFNFLLILTILT/IW
cccttatccaggttnttatctanggaatcccnnnaagactggggaatggagagacagtcaagggttatgtcagaaaaggatgagtatcagtttcaacatcannnagcggngganctgcttgtcttcaattttttgctcatccttaccattttgacaatctggttatttaaaaatcatcgattccgcttcttgcatgaaactggaggagcaatggtgtatggccttataatgggactaatttcacgatatgctacagcaccaactgatattgaaagtggaactgtctgtgactgtgtaaaactaactttcagtccaccaactctgctggttaatgtcactgaccaagtttatgaatataaatacaaaagagaaataagtcagcacaacatcaatcctcatcaaggaaatgctatacttgaaaagatgacatttgatccagaaatcttcttcaatgttttactgccaccaattatatttcatgcaggatatagtctaaagaagagacacttttttcaaaacttaggatctattttaacgtatgccttcttgggaactgccatctcctgcatcgtcatagggtaagtgacattcggagctcaagttgcaggtggctgtggggtctgtgatctgtgtgagggatctaacacttccaggattcttgctggctgggaaaattgtcttttttttagtatatcacatatttgtatgttttttctgacttaattccacggcttctgacaaatacaaggcttcaaatcaaagcaaactagaggattgctggactttctctgtgagttctggacttctgacttagggaatgtggatcacttgccttgagttatgtgaagcgcattgcattcttcttttagtttgagtaatgccgatatggtcactgcattcttttttgtcttgtattgagagaccttacctgtatttggcaggagtgcaaaagtaactatatgccaagagttttctttctaaaggaaagtttacaagacagcagtctgaaacagatatgntccaaatatnnaacagagttgcttaatacagggatagcttttcagttaataccctgtagaatgcagactctttntttcattgtattttcttgattatgctactgagccctaagtcacacgttatatactctggcttgcagctcatcataaagtaaaatgtggtaccaaatggtgaaggcaatccagcctntgataatcccgtccaatacattaaagntccactgc

SEQ ID NO: 198 - DNA, 471 bp, Homo sapiens
  CDS 92..469
  sig_peptide 92..172: Von Heijne matrix score 7.9 seq VVVLALGFLGCYG/AK
  polyA_signal 454..459
  polyA_site 458..471
gcaagtgcagaagtcggtgacggtgggcatctgggtgtcaatcgatggggcatcctttctgaagatcttcgggccactgtcgtccagtgccatgcagtttgtcaacgtgggctacttcctcatcgcagccggcgttgtggtccttgctcttggtttcctgggctgctatggtgctaagactgagagcatgtgtgccctcgtgacgttcttcttcatcctcctcctcatcttcattgctgaggttgcagctgctgtggtcgccctggtgtacaccacaatggctgagcacttcctgacgttgctggtagtgcctgccatcaagaaagattatggttcccaggaagacttcactcaagtgtggaacaccaccatgaaagggctcaagtgccgtggcttcaccaactatacggattttgaggactcaccctacttcaaaatgcataaacctgttacaatgaaaaaaaaaaaaaa

SEQ ID NO: 199 - DNA, 849 bp, Homo sapiens
  CDS 154..675
  sig_peptide 154..498: Von Heijne matrix score 4.8 seq PLRLLNLLILIEG/GV
  polyA_signal 819..824
  polyA_site 838..849
cccctatctccagacctcattcgcaatgaagtagaatgtctgaaagcagatttcaaccacagaatcaaggaggttctcttcaactccctcttcagtgcctactatgttgcatttctccccctgtgttttgtgaagagtacccagtactatgacatgcgctggtcatgtgagcacctcgttatggtgtggatcaatgcttttgtcatgctcaccacgcaactgttgccatccaaatactgtgatttgctacataaatcagctgctcacctgggcaagtggcagaagttggaacatgggtcctacagcaatgctccacagcacatttggtcagaaaatacaatatggcctcaaggggtgctggtgcggcacagcagatgtttatatagagccatggggccttacaacgtggcagtgccttcagatgtatctcatgcccgcttttatttcttatttcatcgaccattaaggctgttaaatctgctcatccttattgagggcggtgtcgtcttctatcagctctattccttgctgcggtcggagaagtggaaccacacactttccatggctctcatcctcttctgcaactactatgttttatttaaacttctccgggacagaatagtattaggcagggcatactcctacccactcaacagttatgaactcaaggcaaactaagctgcctctcaacaatgagggagaactcagataaaaatattttcatacgttctatttttttcttgtgatttttataaatatttaagatgttttatattttgtatactattatgttttgaaagtcgggaagagtaagggatattaaatgtatccgtaaacaaaaaaaaaaaa

SEQ ID NO: 200 - DNA, 896 bp, Homo sapiens
  CDS 18..173
  sig_peptide 18..77: Von Heijne matrix score 6.5 seq GLCVLQLTTAVTS/AF
  polyA_signal 864..869
  polyA_site 882..893
aaccttcacagtgtgagatgcctagtgtgaacagtgctggattatgtgtcttgcagttgacaacggcagtraccagtgcctttttactagcaaaagtgaatcctttcgaarcttttctctcaaggggcttttggctatgtgctgcccatcatttcattcatccttgcctggattgagacgtgttcctgattcaaagtgttacctcaagaagcagaagaagaaaacagactcctgatagttcaggatgcttcagagagggcagcacttatacctggtggtctttctgatggtcagttttattcccctcctgaatccgaagcaggatctgaagaagctgaagaaaaacaggacagtgagaaaccacttttagaactatgagtactacttttgttaaatgtgaaaaaccctcacagaaagtcatcgaggcaaaaagaggcaggcagtggagtctccctgtcgacagtaaagttgaaatggtgacgtccactgctggctttattgaacagctaataaagatttatttattgtaatacctcacagacgttgtaccatatccatgcacatttagttgcctgcctgtggctggtaaggtaatgtcatgattcatcctctcttcagtgagactgagcctgatgtgttaacaaataggtgaagaaagtcttgtgctgtattcctaatcaaaagacttaatatattgaagtaacacttttttagtaagcaagatacctttttatttcaattcacagaatggaatttttttgtttcatgtctcagatttattttgtatttcttttttaacactctacatttcccttgttttttaactcatgcacatgtgctctttgtacagttttaaaaagtgtaataaaatctgacatgtcaaaraaaaaaaamcy

SEQ ID NO: 201 - DNA, 851 bp, Homo sapiens
  CDS 17..595
  sig_peptide 17..85: Von Heijne matrix score 3.70000004768372 seq FLPPLXRAFACRG/CQ
  polyA_signal 820..825
  polyA_site 840..851
aagggggcgtggggccatggtggtcttgcgggcggggaagaagacctttctcccccctctmwgccgcgccttcgcctgccgcggctgtcaactcgctccggagcgcggcgccgagcgcagggatacagcgcccagcggggtctcaagattctgccctccaagaaagtcttgccatgattggataggacccccagataaatattcaaaccttcgacctgttcacttttacatacctgaaaatgaatctccattggaacaaaagcttagaaaattaagacaagaaacacaagaatggaatcaacagttctgggcaaaccagaatttgacttttagtaaggaaaaagaagaatttattcactcaagactaaaaactaaaggcctgggcctgagaactgaatcaggtcagaaagcaacattgaatgcagaagaaatggcggacttctacaaggaatttttaagtaaaaattttcagaagcacatgtattataacagagattggtacaagcgcaattttgccatcaccttcttcatgggaaaagtggccctggaaaggatttggaacaagcttaaacagaaacaaaagaagaggagcaactaggagtccactctgacccagccagagtccaggtttccacaggaagcaratggagctcctttcacaggggctctgagaaaaactggagctgatctcaagaagccccacatcttcctaaggggccccatggcctgtttgggggcagggtaggtcctggggcactgtgggccgcctgcctgctgatgtgggctctaggccagcttgttgtcacgtacgtggtgtgaaataaagcccaagcactgggaaaaaaaaaaaa

SEQ ID NO: 202 - DNA, 495 bp, Homo sapiens
  CDS 89..334
  sig_peptide 89..130: Von Heijne matrix score 3.59999990463257 seq AFTLXSLLQAALL/CV
  polyA_signal 462..467
  polyA_site 484..495
agtaggaasgcgccgsccgtggaggcgccacgtcccttgcsgcggcgggagagamatcgcttggacttcggggcggcctcggacggccatggcctttaccctgtastcactgctgcaggcagccctgctctgcgtcaacgccatcgcagtgctgcacgaggagcgattcctcaagaacattggctggggaacagaccagggaattggtggatttggagaagagccgggaattaaatcasagstaatgavscttattcgatctgtaagaaccgtgatgagagtgccattgataatagtaaactcaattgcaattgtgttacttttattatttggatgaatwtcattggagaaaatggakactcagaaraggacatgccaktaraakttattactttggtcattattggaatatttatatcttagctggctgaccttgcacttgtcaaaaatgtaaagctgaaaataaaaccagggtttctatttaaaaaaaaaaaa

SEQ ID NO: 203 - DNA, 884 bp, Homo sapiens
  CDS 21..614
  sig_peptide 21..83: Von Heijne matrix score 10 seq LWALAMVTRPASA/AP
  polyA_signal 849..854
  polyA_site 873..884
aataccttagaccctcagtcatgccagtgcctgctctgtgcctgctctgggccctggcaatggtgacccggcctgcctcagcggcccccatgggcggcccagaactggcacagcatgaggagctgaccctgctcttccatgggaccctgcagctgggccaggccctcaacggtgtgtacaggaccacggagggacggctgacaaaggccaggaacagcctgggtctctatggccgcacaatagaactcctggggcaggaggtcagccggggccgggatgcagcccaggaacttcgggcaagcctgttggaaactcaratggaggaggatattctgcasctgcaggcaraggccacagctgaggtgctgggggaggtggcccaggcacaraaggtgctacgggacagcgtgcagcggctadaaktccagctgargascgcctggctgggccctgcctaccgaaaatttgargtcttaaaggcyccccckgamaarcaraaccacatcctatgggccctcacaggccacgtgcakcggcarargcgggaratggtggcacagcagcwtckgctgcnacaratccaggaraaactccacacagcggcgctcccagcctgaatctgcctggatggaactgaggaccaatcatgctgcaaggaacacttccacgccccgtgaggcccctgtgcagggaggagctgcctgttcactgggatcagccagggcgccgggccccacttctgagcacagagcaragacagacgcaggcggggacaaaggcagaggatgtagccccattggggaggggtggaggaaggacatgtaccctttcatrmctacacacccctcattaaagcavagtcgtggcatctcaaaaaaaaaaaa

SEQ ID NO: 204 - DNA, 897 bp, Homo sapiens
  CDS 94..573
  sig_peptide 94..258: Von Heijne matrix score 4.69999980926514 seq IGILCSLLGTVLL/WV
  polyA_signal 862..867
  polyA_site 886..897
aagggcggctgcctagcacccggaagagccgtcaacttagcgagcgcaacaggctgccgctgaggagctggagctggtggggactgggccgcaatggacaagctgaagaaggtgctgagcgggcaggacacggaggaccggagcggcctgtccgaggttgttgaggcatcttcattaagctggagtaccaggataaaaggcttcattgcgtgttttgctataggaattctctgctcactgctgggtactgttctgctgtgggtgcccaggaagggactacacctcttcgcagtgttttatacctttggtaatatcgcatcaattgggagtaccatcttcctcatgggaccagtgaaacagctgaagcgaatgtttgagcctactcgtttgattgcaactatcatggtgctgttgtgttttgcacttaccctgtgttctgccttttggtggcataacaagggacttgcacttatcttctgcattttgcagtctttggcattgacgtggtacagcctttccttcataccatttgcaagggatgctgtgaaaaadtgttttgccgtgtgtcttgcataattcatggccagttttatgaagctttggaaggcactatggacagaagctggtggacagttttgtwactatcttcgaaacctctgtcttacagacatgtgccttttatcttgcagcaatgtgttgcttgtgattcgaacatttgagggttacttttggaagcaacaatacattctcgaacctgaatgtcagtagcacaggatgagaagtgggttctgtatcttgtggagtggaatcttcctcatgtacctgtttcctctctggatgttgtcccactgaattcccatgaatacaaacctattcagcaacagcaaaaaaaaaaaa

SEQ ID NO: 205 - DNA, 518 bp, Homo sapiens
  CDS 74..397
  sig_peptide 74..127: Von Heijne matrix score 7.69999980926514 seq LLLLPVLGLLVSS/KT
  polyA_signal 472..477
  polyA_site 507..518
aaagaaagagctgcsgtgcaggaattcgtgtgccggatttggttagctgagcccaccgagaggcgcctgcaggatgaaagctctctgtctcctcctcctccctgtcctggggctgttggtgtctagcaagaccctgtgctccatggaagaagccatcaatgagaggatccaggaggtcgccggctccctaatatttagggcaataagcagcattggccgagggagcgagagcgtcacctccaggggggacctggctacttgcccccgaggcttcgccgtcaccggctgcacttgtggctccgcctgtggctcgtgggatgtgcgcgccgagaccacatgtcactgccagtgcgcgggcatggactggaccggagcgcgctgctgtcgtgtgcagccctgaggtcgcgcgcagcgcgtgcacagcgcgggcggaggcggctccaggtccggaggggttgcgggggagctggaaataaacctggagatgatgatgatgatgatgatggaaaaaaaaaaaa

SEQ ID NO: 206 - DNA, 350 bp, Homo sapiens
  CDS 51..242
  sig_peptide 51..116: Von Heijne matrix score 6.5 seq SCLCPALFPGTSS/FI
  polyA_signal 319..324
  polyA_site 339..350
acgtcattccaaaaccacacccttgcaaagctttgtactccgcaccccagatgatctccaggcagctcagatctctttcctgcctttgccctgcactgttccccggtacttcctcctttattgtagcactcagctccccagccgatctgtacatccctcavaggcascgatctgatgaattggtttttgaatcccaraaagggtctgccatggagttggcagtcatcacggtaratggcgtatgattttgctgaattttaaataaaatgaaaaccataaattacatratgcttttattgachcttgacmactggcctaaataaaaaractctgactccaaaaaaaaaaaa

SEQ ID NO: 207 - DNA, 996 bp, Homo sapiens
  CDS 111..191
  sig_peptide 111..155: Von Heijne matrix score 5.80000019073486 seq FLXLMTLTTHVHS/SA
  polyA_signal 965..970
  polyA_site 986..996
atccgatacagaacatgcagtaatgtggactgcccaccagaagcaggtgatttccgagctcagcaatgctcagctcataatgatgtcaagcaccatggccagttttatgaatgggyttcctgwgtctaatgaccctgacaacccatgttcactcaagtgccaagccaaatgaacaaccctggttgttgaactagcacctaaggtcttaratggtacgcgttgctatacagaatctttggatatgtgcatcagtggtttatgccaaattgttggctgcgatcaccagctgggaagcaccgtcaaggaarataactgtggggtctgcaacrganatgggtccacctgccggctggtccgagggcartataaatcccakctctccgcaaccaaatcrgatgatactgtggttgcaattccctatggaagtakacatattcgccttgtcttaaaaggtcctgatcacttatatctggaarccawaaccctccaggggactaawggtgaaaacagtctcasctccacaggaactttccttgtggacaattctagtgtggacttccagaawtttccagacwdagagatactgagaatggctggaccactcacagcagatttcattgtcaawattcgtaactcgggctccgctgacagtacagtccagkkcatcttctatcaacccatcatccaccgatggagggaracggatttctttccttgctcagcaacctgtggaggaggttatcagctgacatcggctgagtgctacgatctgaggagcaaccgtgtggttgctgaccaatactgtcactattacccagagaacatcaaacccaaacccaagcttcaggagtgcaacttggatccttgtccagccaggtcagtcaaatttgctagttcatttgtcataaacataactcaagttccaaataggttatttaaattaaaatgaaacgttttaattaaaaataaaatgaaattaaacatcaaaaaaaaaaa

SEQ ID NO: 208 - DNA, 860 bp, Homo sapiens
  CDS 45..602
  sig_peptide 45..107: Von Heijne matrix score 8.5 seq LLTIVGLILPTRG/QT
  polyA_signal 828..833
  polyA_site 850..860
acctctctccacgaggctgccggcttaggacccccagctccgacatgtcgccctctggtcgcctgtgtcttctcaccatcgttggcctgattctccccaccagaggacagacgttgaaagataccacgtccagttcttcagcagactcaactatcatggacattcaggtcccgacacgagccccagatgcagtctacacagaactccagcccacctctccaaccccaacctggcctgctgatgaaacaccacaaccccagacccagacccagcaactggaaggaacggatgggcctctagtgacagatccagagacacacwakagcmccaaagcagctcatcccactgatgacaccacgacgctctctgagagaccatccccaagcacakacgtccatdacagaccbcbakdaccctcaakccatctggttttcatgaggatgaccccttcttctatgatgaacacaccctccggaaacsggggctgttggtcgcagctgtgctgttcatcacaggcatcatcatcctcaccagtggcaagtgcaggcagctgtcccggttatgccggaatcattgcaggtgagtccatcagaaacaggagctgacaacctgctgggcacccgaagaccaagccccctgccagctcaccgtgcccagcctcctgcatcccctcgaagagcctggccagagagggaagacacagatgatgaagctggagccagggctgccggtccgagtctcctacctcccccaaccctgcccgcccctgaaggctacctggcgccttgggggctgtccctcaagttatctcctctgctaagacaaaaagtaaagcactgtggtctttgcaaaaaaaaaaa

SEQ ID NO: 209 - DNA, 593 bp, Homo sapiens
  CDS 24..560
  sig_peptide 24..101: Von Heijne matrix score 10.3999996185303 seq LLLLLCGPSQDQC/RP
  polyA_signal 563..568
  polyA_site 583..593
aanccagctgcsgccggccagccatggagactggagcgctgcggcgcccgcaacttctcccgttgctgctgctgctctgcggcccttcccaggatcaatgccgacctgtactccagaatctgttgcagagcccaggcttgacatggagcttggaagtgcccactgggagagaaggaaaggaaggtggggatcggggaccagggctaaktggggccactccagccaggagccctcagggcaaggagatggggagacaaaggaccagaaaggtgaagggccctgcttggaktcacacagcaaatcaggaactaaacaggatgaggtctctgtcttctggctccgtgccagtggggcatctggagggtggcacggtcaagcttcagaaggacacgggcctccattcctgcaragatggtatggcttctcttgaagggacgccagcttcagtcctggctgatgcttgcccaggattccatgatgtgaangttcararggccctatttgggttaagtggganartactgtggctgaaaacccacttctgcctttctattanactttaaataaactctgaaracctgtaaaaaaaaaaa

SEQ ID NO: 210 - DNA, 1114 bp, Homo sapiens
  CDS 109..558
  sig_peptide 109..273: Von Heijne matrix score 3.70000004768372 seq VAFMLTLPILVCK/VQ
  polyA_site 1104..1114
attagctstccaaggtctcccccagcactgaggagctcgcctgctgccctcttgcgcgcgggaagcagcaccaagttcacggccaacgccttggcactagggtccagaatggctacaacagtccctgatggttgccgcaatggcctgaaatccaagtactacagactttgtgataaggctgaagcttggggcatcgtcctagaaacggtggccacagccggggttgtgacctcggtggccttcatgctgactctcccgatcctcgtctgcaaggtgcaggactccaacaggcgaaaaatgctgcctactcagtttctcttcctcctgggtgtgttgggcatctttggcctcaccttcgccttcatcatcggactggacgggagcacagggcccacacgcttcttcctctttgggatcctcttttccatctgcttctcctgcctgctggctcatgctgtcagtctgaccaagctcgtccgggggaggaaagcccctttccctgttggtgattctgggtctggccgtgggcttcagcctagtccaggatgttatcgctattgaatatattgtcctgaccatgaataggaccaacgtcaatgtcttttctgagctttccgctcctcgtcgcaatgaaaactttgtcctcctgctcacctacktcctcttcttgatggcgctgaccttcctcwtgtcctccttcaccttctgtggtkccttcacgggctggaavagacatggggcccacatctacctcasgatgctcskctccattgccatctgggtggcctggatcaccctgctcatgcttcctgactttgaccgcrggtgggatgacaccatcmtcarctccgccttggstrcsaatggctgggtgttcctgttggcttatgttagtcccgagttttggctgctcacaaagcaackaaaccccatggattatcctgttgaggatgctttctgtaaacctcaactcgtgaagaagagctatggtgtggrgaacagagcctaskctcaagaggaaatcactcaaggttttgaagagacaggggacacgctctatgccccctattccacacattttcagctgcagaascagcctccccaaaaaaaaaaa

SEQ ID NO: 211 - DNA, 1182 bp, Homo sapiens
  CDS 128..835
  sig_peptide 128..220: Von Heijne matrix score 4.69999980926514 seq LAVDSWWLDPGHA/AV
  polyA_signal 1145..1150
  polyA_site 1170..1181
aagaactgcgtctcgcgacccaggcgcgggttcccggaggacagccaacaagcgatgctgccgccgccgtttcctgattggttgtgggtggctacctcttcgttctgattggccgctagtgagcaagatgctgagcaagggtctgaagcggaaacgggaggaggaggaggagaaggaacctctggcagtcgactcctggtggctagatcctggccacgcagcggtggcacaggcacccccggccgtggcctctagctccctctttgacctctcagtgctcaagctccaccacagcctgcagvrragtragccggacctgcggcacctggtgctggtcatraacactctgcggcgcatccaggcgtccatggcacccgcggctgccctgccacctgtgcctaccccacctgcagcccccantgtggctgacaacttactggcaagctcggacgctgccctttcagcctccatggccarmctcctggargacctcagccacattgagggcctgagtcaggctccccaacccttggcagacgaggggccaccaggccgtagcatcgggggawcaccgcccamcctgggtgccttggacctgctgggcccagccactggctgtctactggacaatgggcttgagggcctgtttgaggatattgacacctctatgtatgacaatgaactttgggcaccagcctctgagggcctcaaaccaggccctgaggatgggccgggcaaggaggaagctccggagctggacgaggccgaattggactacctcatggatgtgctggtgggcacacaggcactggagcgaccgccggggccagggcgctgagccctcgtgctggaatggttgtctggtatctgaactgagcctgctggctggaccaactgtcctcgaaaagacacagctggcttccctagtacagagaacagggcttgggccactttggagagacagaatctagtcctgggcaacttcacatccgtcctcctgtctcagggctggcagggggagcctggaattaccccctagtgatggaatgacagggtctggtggggactgaattccctggccctggggtcatagcttgggctgttccttctctgatacgggaagagacccaatcagatttttcaaattaaagccagtcctgggaaatctcaaaaaaaaaaaac

SEQ ID NO: 212 - DNA, 1073 bp, Homo sapiens
  CDS 59..505
  sig_peptide 59..358: Von Heijne matrix score 3.70000004768372 seq LASSFLFTMGGLG/FI
  polyA_signal 1042..1047
  polyA_site 1062..1073
actgtttnngggaggcgcgtggggcttgaggccgagaacggcccttgctgccaccaacatggagactttgtaccgtgtcccgttcttagtgctcgaatgtcccaacctgaagctgaagaagccgccctggttgcacatgccgtcggccatgactgtgtatgctctggtggtggtgtcttacttcctcatcaccggaggaataatttatgatgttattgttgaacctccaagtgtcggttctatgactgatgaacatgggcatcagaggccagtagctttcttggcctacagagtaaatggacaatatattatggaaggacttgcatccagcttcctatttacaatgggaggtttaggtttcataatcctggacggatcgaatgcaccaaatatcccaaaactcaatagattccttcttctgttcattggattcgtctgtgtcctatwragtttttkcayggctagagtattcatgagaatgaaactgccgggctatctgatgggttagagtgcctttgasaagaaatcagtggatactggatttgctcctgtcaawgaasttttaaaggctgtmccaatcctctaatatgaaatgtggaaaagaatgaagagcagcagtaaaagaaatatctagtgaaaaaacaggaagcgtattgaagcttggactagaatttcttcttggtattaaagagacaagtttatcacagaattttttttcctgctggcctattgctataccaatgatgttgagtggcattttctttttagtttttcattaaaatatattccatatctacaactataatatcaaataaagtgattattttttacaaccctcttaacattttttggagatgacatttctgattttcagaaattaacataaaatccagaagcaagattccgtaagctgagaactctggacagttgatcagctttacctatggtgctttgcctttaactagagtgtgtgatggtagattatttcagatatgtatgtaaaactgtttcctgaacaataagatgtatgaacggagcagaaataaatactttttctaattaaaaaaaaaaaa

SEQ ID NO: 213 - DNA, 818 bp, Homo sapiens
  CDS 1..207
  sig_peptide 1..147: Von Heijne matrix score 7.59999990463257 seq HLPFLLLLSCVGX/XP
  polyA_signal 784..789
  polyA_site 807..818
atgcctttccattttccgttccttgggtttgtgtgtctgcatctccatcttaccccttgcctgactgtaccccgtagacccctgtttctcctcctgcacctgtgtccccatctgcccttcttgttgctcctgtcatgtgtcggggkcwwwccctcctgtctgccttcttcctccacttgtgtcagcttgcatttttttattcctgactgagtcaccacacccctctcccctgatcaaagggaatatkartttttaatttggatcgactgaggtgccaggagaaactgcagkcccaggtatccmvacagccaccaggatggtccctcgccccacccccaccgcctctkccccaccttttccaacgtgttgcatgctgggaactggggggtgtgggggaaggggctgccggcttctttcaggangctgargtttggargcaaaatcaacctgggaraccaccccggccgcggcgcctcagtggacaggtgggargaaaagaaaacttcttaccttggargarggacatcccgcttccttatccttagcttttttgttgctcctccccactgccccttttaatttatttggttgtttgcggaaggaggggggaagggggtaagctgggccgggaactgtccgaggtgctgagctggggcgggaccggaatcctcccggtagggtaccagggactgagttgggcctggggccgtgtccaaggtgccaatgatgcgggccgacagarcgggccgcactgtctgtctgtccgtctgtcccggaaagaactataaagcgctggaagcgcctgcaaaaaaaaaaaa

SEQ ID NO: 214 - DNA, 971 bp, Homo sapiens
  CDS 12..734
  sig_peptide 12..101: Von Heijne matrix score 4.80000019073486 seq ILFCVGAVGACTL/SV
  polyA_signal 914..919
  polyA_site 961..971
aatacacagaaatggggactgcgagcagaagcaacatcgctcgccatctgcaaaccaatctcattctattttgtgtcggtgctgtgggcgcctgtactctctctgtcacacaaccgtggtacctagaagtggactacactcatgaggccgtcaccataaagtgtaccttctccgcaaccggatgcccttctgagcaaccaacatgcctgtggtttcgctacggtgctcaccagcctgagaacctgtgcttggacgggtgcaaaagtgaggcagasaagttcacagtgagggaggccctcaaagaaaaccaagtttccctcactgtaaacagagtgacttcaaatgacagtgcaatttacatctgtggaatagcattccccagtgtgccggaagcgagagctaaacagacaggaggagggaccacactggtggtaagagaaattaagctgctcagcaaggaactgcggagcttcctgacagctcttgtatcactgctctctgtctatgtgaccggtgtgtgcgtggccttcatactcctctccaaatcaaaatccaaccctctaagaaacaaagaaataaaagaagactcacaaaagaagaagagtgctcggcgtatttttcaggaaattgctcaagaactataccataagagacatgtggaaacaaatcagcaatctgagaaagataacaacacttatgaaaacagaagagtactttccaactatgaaaggccatagaaacgttttaattttcaatgaagtcactgaaaatccaactccaggagctatggcagtgttaatgaacatatatcatcaggtcttaaaaaaaaataaaggtaaactgaaaagacaactggctacaaagaaggatgccaraatgtaaggaaactataactaataktcattaccaaaatactaaaacccaacaaaatgcaactgaaaaataccttccaaatttgccaaaaaaaaaaw

SEQ ID NO: 215 - DNA, 640 bp, Homo sapiens
  CDS 378..518
  sig_peptide 378..467: Von Heijne matrix score 5.5 seq SLMTCTTLINASA/IS
  polyA_signal 607..612
  polyA_site 628..640
agcctgggtaakgcccaagatggctgtcttcgccttagtactcgtgtgaagttggcggggacggttcctgtcatcttcttgggcttatttggtgtgctgttgaaggggggagactagagaaatggcagggaacctcttatccggggcaggtaggcgcctgtgggactgggtgcctctggcgtgcagaagcttctctcttggtgtgcctagattgatcggtataaggctcactctcccgccccccaaagtggttgatcgttggaacgagaaaagggccatgttcggagtgtatgacaacatcgggatcctgggaaactttgaaaagcaccccaaagaactgatcagggggcccatatggcttcgaggttggaaagggaatgaattgcaacgttgtatccgaaagaggaaaatggttggaagtagaatgttcgctgatgacctgcacaaccttaataaacgcatccgctatctctacaaacactttaaccgacatgggaagtttcgatagaagagaaagctgagaacttcggaaaaggctcatctgtcaccctggaraagggaaactgtacttttccctgtgaggaaacggctttgtattttctctgtaataaaatggggcttctttggaaaaaaaaaaaaa

SEQ ID NO: 216 - DNA, 745 bp, Homo sapiens
  CDS 110..304
  sig_peptide 110..193: Von Heijne matrix score 4.59999990463257 seq PLQWSLLVAVVAG/SV
  polyA_signal 708..713
  polyA_site 732..743
acttccgcctgcgcctgcgcagcvcagctccshgagccctgccaaccatggtgaacttgggtctgtcccgggtggacgacgccgtggctgccaagcacccggcaccggcatggcctttggcttgcagatgttcattcagaggaagtttccataccctttgcagtggagcctcctagtggccgtggttgcaggctctgtggtcagctacggggtgacgagagtggagtcggagaaatgcaacaacctctggctcttcctggagaccggacagctccccaaagacaggagcacagatcagaraagctaggagagctccagcaggggcacagargattgggggcaggargartctggaacacakccttcatgccccctgaccccaggccgaccctccccacaccctagggtaccccagtcgtatcctctgtccgcatgtgtggccaggcctgacaaacmcctgcagatggctgctgccccaacctgggacctgcccaggaggttggagcagaaagggctctccctggggtggtgtttctcctctagggtattgggatgcatgttctgcactgccagcagagagggtgtgtctgggggccaccacctatgggacacggggtcgaaggggcctgtacactctgtcatttcctttctagcccctgcatctccaacaagtccaaggtgacagctggtgctaggggcgtggggttaataaatggcttatccttctctccaaaaraaaaaaamc

SEQ ID NO: 217 - DNA, 637 bp, Homo sapiens
  CDS 201..419
  sig_peptide 201..272: Von Heijne matrix score 6.40000009536743 seq LSYLPLWLGPIWP/CS
  polyA_signal 601..606
  polyA_site 627..637
acaaaatataattgcctctsccctctcccattttctctcttgggagcaatggtcacagtccctggtacctgaaaaggtacctaggtctaggcccttcttccctttcccttcctctcccctaccccagaactttggctccctttcccttctctctctggtagctccaggaggcctgtgatccagctccctgcctagcatccatgacctgttggatgttacctccaatcagtttcctgtcctacctgcctctttggcttggacctatatggccatgctctggctctacccttgggaagcctgatcccggtgtgtggcccagcttgttcaggccctgggatgctgcatctccaggcaactatgcactttcccggggararaaccaktatgavaaktgggggcagggcacacattcatctttgtargaaggtctggcctggggtcrggtgaaggagggcccaggtcagttctggggtcccagtgacctgctttgccattctcctggtgccgctgctgctccctgtttctggagctggatgttccccacctggcagttgagctgcctgagccaatgtgtctgtctttggtaactgagtgaaccataataaaggggaacatttggccctgtgaaaaaaaaaaa

SEQ ID NO: 218 - DNA, 1315 bp, Homo sapiens
  CDS 123..302
  sig_peptide 123..176: Von Heijne matrix score 4.30000019073486 seq WTCLKSFPSPTSS/HA
  polyA_signal 1279..1284
  polyA_site 1301..1312
aagagcatcctgcgccccggcgcggggccctgcggtagcctcaggcccctcccctggacccgccgcagagccagtgcagaatacagaaactgcagccatgaccacgcacgtcaccctggaagatgccctgtccaacgtggacctgcttgaagagcttcccctccccgaccagcagccatgcatcgagcctccaccttcctccatcatgtaccaggctaactttgacacaaactttgaggacaggaatgcatttgtcacgggcattgcaaggtacattgaccaggctacagtccactccagcatgaatgaratgctggaggaaggacatgaktatgcggtcatgctgtacacctggcgcagctgttcccgggccattccccaggtgaaatgcaacragcagcccaaccgaktararatctatgaraaracagtaraggtgctggagccggaggtcaccaagctcatgaagttcatgtattttcarcgcaaggccatcgagcggttctgcascgaggtgaagcggctgtgccatgccgagcgcaggaaggactttgtctctgaggcctacctcctgacccttggcaagttcatcaacatgtttgctgtcctggatgagctaaagaacatgaastgcagcgtcaaraatgaccactctgcctacaagagggcagcacagttcctgcggaagatggcagatccccagtctatccaggagtcgcagaacctttccatgttcctggccaaccacaacaggatcacccagtgtctccaccagcaacttgaagtgatcccaggctatgaggagctgctggctgacattgtcaacatctgtgtggattactacgagaacaagatgtacctgactcccagtgagaaacatatgctcctcaaggtaaaactcccctgaggccgcacccatggagcctgggcttaccctctcaccttcttcttattaaaaatccgttttaaaaaacaatgtttcttttttcttaaacattgatacagatcttacggcacataatggtttgtaacctgttcctttcctgtaatataatataccgtagtcacctttccagatgtcattaaggctatttctacaatgttatgtgtaatgactgccaagtattctgttgtattggaacattgtcatgtaacatatcccctgtggttggatatttgctaaacttcattgaacacccttgtagcagtttttgtgcacatctttttgtcaaggcaaacttcctagaagagaaattgctggctcaaagggaaaaacagaataaatcgttttttttatttcaaaaaaaaaaaaccc

SEQ ID NO: 219 - DNA, 1035 bp, Homo sapiens
  CDS 98..673
  sig_peptide 98..376: Von Heijne matrix score 5.59999990463257 seq VLLLRQLFAQAEK/WY
  polyA_site 1025..1035
aattttcygtggtccaactaccctcggcgatcccaggcttggcggggcaccgcctggcctctcccgttcctttaggctgccgccgctgcctgccgccatggcagagttgggcctaaatgagcaccatcaaaatgaagttattaattatatgcgttttgctcgttcaaagagaggcttgagactcaaaactgtagattcctgcttccaagacctcaaggagagcaggctggtggaggacaccttcaccatagatgaagtctctgaagtcctcaatggattacaagctgtggttcatagtgaggtggaatctgagctcatcaacactgcctataccaatgtgttacttctgcgacagctgtttgcacaagctgagaagtggtatcttaagctacagacagacatctctgaacttgaaaaccgagaattattagaacaakttgcagaatttgaaaaagcaravattacatcttcaaacaaaaagcccatcttadatgtcacaaasccaaaacttgctccacttaatgaaggtggaacagcaaaactcctaaacaaggtaatatgtattattttgagaaacggaaagtctctcattctgtcctgtcattgcctagggtggagaaacaaaagtggaaggtttgtttcaggtcctctgaggataattagtccattgcagtagttttacttgatggtaccccatgggccagaagagggcatacttaaccttctagagagcctgaagtagctcctgatcacaccttttcaaggtaaagtgaagagcatgaaattttggacagcgtttattgatggacatttaaagtttgtgatctgcggtaacaaggagaagggtttttaagtttataaaaattatttatcaattagccgggtgtggtggtacgtgcctatagtcagagctactcgggaggctgaggcaggagaattgcttgaacccgggaggtggaggttgcagtgagctgagatcacgccactgcactctagcctgggcgacagagcgagactccatctcaaaaaaaaaaa

SEQ ID NO: 220 - DNA, 696 bp, Homo sapiens
  CDS 17..463
  sig_peptide 17..232: Von Heijne matrix score 3.79999995231628 seq LMGLALAVYKCQS/MG
  polyA_signal 657..662
  polyA_site 684..696
actcaaacagattcccatgaatctcttcatcatgtacatggcaggcaatactatctccatcttccctactatgatggtgtgtatgatggcctggcgacccattcaggcacttatggccatttcagccactttcaagatgttagaaagttcaagccagaagtttcttcagggtttggtctatctcattgggaacctgatgggtttggcattggctgtttacaagtgccagtccatgggactgttacctacacatgcatcggattggttagccttcattgagccccctgagagaatggagtcagtggtggaggactgcttttgtgaacatgagaaagcagcgcctggtccctatgtatttgggtcttatttacatccttctttaagcccagtggctcctcagcatactcttaaactaatcacttatgttaaaaaaaaccaaaaaactcttttctccatggtggggtgacaggtcctaaaaggacaatgtgcatattacgacaaacacaaaaaaactataccataacccagggctgaaaataatgtaaaaaactttatttttgtttccagtacagagcaaaacaacaacaaaaaaacataactatgtaaacaaaaaaataactgctgctaaatcaaaaactgttgcagcatctcctttcaataaattaaatggttgaraacaatgcaaaaaaaaaaaaa

SEQ ID NO: 221 - DNA, 868 bp, Homo sapiens
  CDS 263..481
  sig_peptide 263..322: Von Heijne matrix score 11.1999998092651 seq ILVVLMGLPLAQA/LD
  polyA_site 858..868
aagacacgcctacgattagactcaggcaggcacctaccggcgagcggccgcrvgtgactcccaggcgcggcggtacctcacggtggtgaaggtcacagggttgcagcactcccagtagaccaggagctccgggaggcagggccggccccacgtcctctgcgcaccaccctgagttggatcctctgtgcgccacccctgagttggatccagggctagctgctgttgacctccccactcccacgctgccctcctgcctgcagccatgacgcccctgctcaccctgatcctggtggtcctcatgggcttacctctggcccaggccttggactgccacgtgtgtgcctacaacggagacaactgcttcaaccccatgcgctgcccggctatggttgcctactgcatgaccacgcgcacctactacacccccaccaggatgaaggtcagtaagtcctgcgtgccccgctgcttcgarnactgtgtatgatggctactccaagcacgcgtccaccacctcctgctgccagtacgacctctgcaacggcaccggccttgccaccccggccaccctggccctggcccccatcctcctggccaccctctggggtctcctctaaagcccccgaggcagacccactcaagaacaaagctctcgagacacactgctayaccctckcacccakctcaccctgcctcaccctccacactccctgcgacctcctcagccatgcccagggtcaggactgtgggcaagaagacacccgacctcccccaaccaccacacgacctcacttcgaggccttgacctttcgatgctgtgtgggatcccaaaagtgtccggctttgatgggctgatcagcaaaaaaaaaaa

SEQ ID NO: 222 - DNA, 775 bp, Homo sapiens
  CDS 42..299
  sig_peptide 42..101: Von Heijne matrix score 5.40000009536743 seq WFVHSSALGLVLA/PP
  polyA_site 762..775
aacgatacaaatggtaggccttcatgtgagccagtdactacatgaatcttcatttcccacagtggtttgttcattcatcagcgttaggcttggtcctggctccacctttctcctctccgggcactgaccccacctttccgtgtatttactgtaggctattaaatatgatcatgacccgccttgcattttcattcatcacctgtttatgcccaaatttaaaggaagtttgtctcattttgccagaaaaaaattgtaatagtcgacacgctggatttgtagggccascaaaattgcggcagtgaaactwkkttcwcttctaaagcccttcatttcccacaaggttaagctctcgaaaccccatttgatccttggttcctatttcgatcctcctttggaatctgaaaatcggtctccatgttgtatgcaaattaaaakttgccttgtttgttactcttccaacacagggtatcagggaraaagaggccttatctgttcctccatcccccctgttttgacagactgctaagaattcctcaggacttcctttggttggggattttactttcccaaaagtctgatctgatttctttcaggggtagacaagcttgtcctagtgctctgcttcaggtcttatcagaagaaacccaggaatagaaaaggtagatgccttgacttttgtccctgttgtggggactaaagtgttttttgccagaattgtcaaaagctccggttcaaactctgtagagtttcatggaaaaacaaaacaaaaaaaaaa

SEQ ID NO: 223 - DNA, 1075 bp, Homo sapiens
  CDS 198..431
  sig_peptide 198..260: Von Heijne matrix score 6.90000009536743 seq LLACGSLLPGLWQ/HL
  polyA_site 1064..1074
atatatttctgaggcagtacccatctcacttgtaaacttaaaagacaccgcagagatttgagggactcagaagtcaaatagagtaggttaaaaacctcttatttttcaaattaattgttttaagaaacaagcatacctgtgtaagtgaaatatcttaatttgtgttgaatcaagttaggagacagagattctcatgaatgtgtcctgtgttctcaaagcagctgctagcctgtgggtctctcctacctgggttatggcagcacctcacagccaatcactggcctccattctccsctttcctctgtacagtttgctctggttcctcagagcagatttccgagtatactgcttcagccacgcccccactgtgccgttccctgaaccaagagccattcgtytcaagagccattcgtccaaagtactctatcacctagccattgtakccataccaagccgggcttcctacttccctctgctccccttggtttcctcctgtraartaaatctcactgacccttgatgcasctccaagcatatataatatatatataataaaaccatabtctaaaaaattcaaaccaggawaaataaasccaraaatttgtatgggaaaaatctgcacaaatttatttggccagcatggttatcatggctctattgaatttatccttgaccgtctttaaagccaaagcaaacgggataaagtgatcaactacttacctctcaataccaaaaargaagcaggaggcaaaatctctcawtaatttcataaaaacaattcttakctgggcgcggtggctcwcacctgtartcccaacactttgggaggccsaggtgggcggatcatgaggtcgggagatcaamaccatcctggctaacatggtgaaaccccatctctactaaaattacaaaaaattrgctgggcgaggtggcgggcacctgtggtcccagctactcgggaggctgaggcaagagaatggtgtgaaccccagggggcggagcctgcagtgagctgagatcgcaccactgcactccagcctgggcgacagtgagactccgtctcaaaaaaaaaaah

SEQ ID NO: 224 - DNA, 981 bp, Homo sapiens
  CDS 279..473
  sig_peptide 279..362: Von Heijne matrix score 4.40000009536743 seq SCFLVALIIWCYL/RE
  polyA_signal 944..949
  polyA_site 970..981
agaatcgtgtcttgtgtgccccggcggccgggtgagctcctcaaggtctcggagggccgagggcagacaccggcgggcgggcggasgcttactgctctctctcttccagggccgtccgggcgctgaggctcataggctgggcttcccgaagccttcatccgttgcccggttcccgggatcgggcccaccctgccgccgaggaagaggacgaccctgaccgccccattgagttttcctccagcaaagccaaccctcaccgctggtcggtgggccataccatgggaaagggacatcagcggccctggtggaaggtgctgcccctcagctgcttcctcgtggcgctgatcatctggtgctacctgagggaggagagcgaggcggaccagtggttgagacaggtgtggggagaggtgccagagcccagtgatcgttctgaggagcctgagactccagctgcctacagagcgagaacttgacggggtgcccgctggggctggcaggaagggagccgacasccgcccttcggatttgatktcacgtttgcccgtgactgtcctggctatgcktgcgtcctcagcactraargacttggctggtggatggggcacttggctatgctgattcgcgtgaaggcggavcaaaatctcagcaaatcggaaactgctcctcscctggctcttgatktccaaggattccatcggcaaaacttctcaratccttggggaaggtttcagttgcactgtatgctgttggatttgccaagtctttgtataacataatcatgtttccaaagcacttctggtgacacttgtcatccagtgttagtttgcaggtaatttgctttctgagatagaatatctggcagaagtgtgaaactgtattgcatgctgcggcctgtgcaaggaacacttccacatgtgagttttacacaacaacaaatgaaaataaattttaattttataatatgggaaaaaaaaaaaa

SEQ ID NO: 225 - DNA, 1031 bp, Homo sapiens
  CDS 12..644
  sig_peptide 12..92: Von Heijne matrix score 4 seq LTFFSGVYGTCIG/AT
  polyA_signal 1002..1007
  polyA_site 1020..1031
acaccaaggagatgctccttcttagtattacaactgcttatacaggtctggaattaactttcttctctggtgtatatggaacctgtattggtgctacaaataaatttggagcagaagagaraagccttattggactttctggcattttcatcggcattggagaaattttaggtggaagcctcttcggcctgctgagcaagaacaatcgttttggtagaaatccagttgtgctgttgggcatcctggtgcacttcatagctttttatctaatatttctcaacatgcctggagatgccccgattgctcctgttaaaggaactgacagcagtgcttacatcaaatccagcaaaraatttgccattctctgcakttttctgtkgggccttggaaacagctgctttaatacccasctgcttaktatctkgggctttctgtattctgaaracagcgccccakcatttgccatcttcaattttgttcagtctatttgcgcagccgtggcatttttctacagcaactaccttctccttcactggcaactcctggtcatggtkatwtttgggtttttkggaacaatttctttcttcactgtggaatgggaasctgccgcctttgtascccgcggctctgactaccgaagtatctgatctggtgtccgtgaggggacacgtatgacctcagaaacacagctggacacagagcttggtggaagaagtcgcctttgatcttcactatatattgggtgatgttcagtatggaaaatcaagggattaagactgttaaatcagccagagtkggtgttcaagtttacagatatgagttatttaaagcaagtagaataagggaaagctgttctgtcaactgtaattgttcaaagatgttgtttttcatttcatctatctcaattcttataatcatgttatagaatgtaaatgttttcttctctctcctgctcttgttggaagatcctgccttgatttagaatactaggccatatgtcatataaatattttttctggaaaaaaaaaaaa

SEQ ID NO: 226 - DNA, 1283 bp, Homo sapiens
  CDS 91..459
  sig_peptide 91..330: Von Heijne matrix score 7.69999980926514 seq LVLFLSLALLVTP/TS
  polyA_site 1271..1281
tattccttggagttccacgactgaattaagactgttgtgggrdccataattttcaaatacttgccctatattcgtgttgagggttcacacatgagcacatggtatttggcacttaataagtcctataagaataaagacagcgttaggatttatctcagcttgtgcacagtgagcattaaatttacatactttcatgatatacagactaattgtcttacaacatggaaacattcgagatgcagattttattgggcatttggtggttccattttacagcactcagtggatccccttgttttgttcctaagcctggccctgttagtgacacccacttccaccccttctgctaaratacaragccttcaaattgacctccctggaggctggaggctggccactgacaggatctttaccctctcccccgtacccatggacrgccccctcatccttcatcagttgtaaaggtagatatttgttccttggagtccaacatcatgctgttcagaatataatgagatcaatagttgaaaaactagatatacatgccacccwgacaaagctattaagttattaagtgtcagccctggatcttggcttattgtgaaatgttaattattttatcactcyattaagaagctgtgggctccatctcagcattgaaaagggactaatttgctctgttttggaattgaattagctttcaggccascagggcactgtttggtaaattgctttttccagtactagcatgttttctccctccatagcctctgttagcttctgagcttgtaacctccagggaaavatgagaatattcacccttttaatatgtgtagagaccatgcaagaccattgtcttctaataattagaaatacttagccagattctctatagtaaacccggagattgggagggctgctttctacttggtgcatccttctgcgcttctaatgatttttaaaaatctgttaataattgatgttttctggctgggcacagtggctcacgcctgtaatcccagcactttgggaggccaaggagggcagatcatgaggtcaggagattgaraccatcctggctaacacggtgaaaccccgtctctactaaaaatacaaaaraattakccgggcatggtagtgggcgcctgtgtacccagctactggggaggctgaggcargaraatcgcttgaacctgggaggcggaggttgcastragctgagatggtgccaccgcactctagcctgggtgacagagcgagacttcatttcaaaaaaaaaaamc

SEQ ID NO: 227 - DNA, 1777 bp, Homo sapiens
  CDS 70..327
  sig_peptide 70..147: Von Heijne matrix score 9.60000038146973 seq WLIALASWSWALC/RI
  polyA_signal 1741..1746
  polyA_site 1763..1774
agcccggtttcgtgcccgcggccgactgcgcasctgtccgcgagtctgagatacttacagagagctacaatggaaaagtcctggatgctgtggaactttgttgaaagatggctaatagccttggcttcatggtcttgggctctctgccgtatttctcttttacctttaatagtgacttttcatctgtatggaggcattatcttacttttgttaatattcatatcaatwkcaggtattctgtataaattccasgatgtattgctttattttccwkaacagyyatcctcttcacgtctttatgattcccatgcccactggcmttcgrcataaaaaaattttcatcagaaccaaagatggaatacgtctgaatcttattttgatacgatacactggagacaattcaccctattccccaactataatttattttcatgggaatgcaggcaacataggtcacaggttggccaaatgcattacttatgttggttaacctcaaagttaaccttttgctggttgattatcgaggatatggaaaaagtgaaggagaagcaagtgaagaaggactctacttagattctgaagctgtgttagactacgtgatgactagacctgaccttgataaaacaaaaatttttctttttggccgttccttgggtggarcagtggctattcatttggcttctgaaaattcacataggatttcagccattatggtggagaacacatttttaagcataccacatatggccagcactttattttcattctttccgatgcgttaccttcctttatggtgctacaaaaataaatttttgtcctacagaaaaatctctcagtgtagaatgccttcacttttcatctctggactctcagatcaattaattccaccagtaatgatgaaacaactttatgaactctccccatctcggactaaganattagccatttttccagatgggactcacaatgacacatggcagtgccaaggctatttcactgcacttgaacagttcatcaaagaagtcgtaaagagccattctcctgaagaaatggcaaaaacttcatctaatgtaacaattatataatgtttccctttttgattattgcattgtattttaatttgtgcagaatgataaagaatgttccttttagaagtgtgttatgtctgtacctgtctgaagagtgacattaaactttgaaaggacttcactgctcctttacgatattccaaatagttttttacattggaaaaactaattcttgggattctttcatacattttcatcaaaactttcagtgtgattatgtattcatatcttcagtttaatatgtcagtataatagatattgttcaaaagtttcttgttgctaaagtggtgtaatctgttacacagatgaatagctagatgtggaaagagatatgtaaacaagaaacctttgggtattgtttcttaagtaaatattgggacaatcatggtaagcaaacttagttctgtaactgcatttttcaccttaaaagttaaatgaaatgcatgatggtattttattccttgaattatgcaatgcaacattttacatgtaaatagcactggtcatatactgatgtatatggttatctgggttatatctatttttatgtaaactctatttttgtttttggcaagaagtgaaattgagacttatgtgcaggttgccattgaattttgctctggtgaatgctgagatccagctttttcttacaaataaatgggaccctgttttccaaaaaaaaaaaamcm

SEQ ID NO: 228 - DNA, 970 bp, Homo sapiens
  CDS 12..497
  sig_peptide 12..104: Von Heijne matrix score 5.5 seq LVGVLWFVSVTTG/PW
  polyA_signal 935..940
  polyA_site 955..967
aggtctccaagatggcggccgcctggccgtctggtccgkctgctccggaggccgtgacggccagactcgttggtgtcctgtggttcgtctcagtcactacaggaccctggggggctgttgccacctccgccgggggcgaggagtcgcttaagtgcgaggacctcaaagtgggacaatatatttgtaaagatccaaaaataaatgacgctacgcaagaaccagttaactgtacaaactacacagctcatgtttcctgttttccagcacccaacataacttgtaaggattccagtggcaatgaaacacattttactgggaacgaagttggttttttcaagcccatatcttgccgaaatgtaaatggctattcctacaatgagcagtcgcatgtctctttttcttggatggttgggagcagatcgattttaccttggataccctgctttgggtttgttaaabtttygcactgtagggtttkgtggaattgggagcctaattgatttcatycttatttcaatgcagattgttggaccttcaaatggaagtagttacattatagattactatggaaccagacttacaagactgagtattactaatgaaacatttagaaaaacgcaattatatccataaatattttttaaaagaaacagatttgagcctccttgattttaatagagaacttctagtgtatggatttaaagatttctctttttcattcatataccattttatgagttctgtataattttttgtggtttttgttttgttgagttaaagtatattattgtgagatttatttaataggacttcctttgaaagctgtataatagtgtttctcgggcttctgtctctatgagagatagcttattactctgatactctttaatcttttacaaaggcaagttgccacttgtcatttttgtttctgaaaaataaaagtataacttattcacaaaaaaaaaaamms

SEQ ID NO: 229 - DNA, 645 bp, Homo sapiens
  CDS 90..383
  sig_peptide 90..200: Von Heijne matrix score 4.90000009536743 seq MLIMLGIFFNVHS/AV
  polyA_signal 609..614
  polyA_site 632..643
atctctgcccccctgcgagggcatcctgggctttctcccaccgctttccgagcccgcttgcacctcggcgatccccgactcccttctttatggcgtcgctcctgtgctgtgggccgaagctggccgcctgcggcatcgtcctcagcgcctggggagtgatcatgttgataatgctcggaatatttttcaatgtccattccgctgtgttgattgaggacgttcccttcacggagaaagattttgagaacggcccccaraacatatacaacctttacragcaaktcagctacaactgtttcatcgctgcaggcctttacctcctcctcggaggcttctctttctgccaakttcggctcaataagcgcaaggaatacatggtgcgctagggccccggcgcgtttccccgctccagcccctcctctatttaaaractccctgcaccgtktcacccaggtcgcgtcccacccttgccggcgccctctgtgggactgggtttcccgggcrararactgaatcccttctcccatctctggcatccggcccccgtggararggctgaggctggggggctgttccgtctctccacccttcgctgtgtcccgtatctcaataaagagaatctgctctcttcaaaaaaaaaaaamy

SEQ ID NO: 230 - DNA, 773 bp, Homo sapiens
  CDS 332..541
  sig_peptide 332..376: Von Heijne matrix score 3.59999990463257 seq FLPCCLLWSVFNP/ES
  polyA_signal 739..744
  polyA_site 761..773
aaaacaattcatgcctttcatagtttattattattaaagtctaaacaaaattgcaatttcttaggtaaccttatatttacaataaatgaagattaccctcaaatgctagaagctgtctaggtccgtccggtgtgtcagattttcctcagattagatgtgccaataaccaagtttattcagtaaacaacttgtacttgtttcatctggttttattactctcacccataaacagtaatgactctctgaccctctggaaatatgtaatgcttccaatcttgctttgtgtatctcatttaatttgttataaggtagtactgattttagcatattaatgcgatttcttccttgttgtttgctttggtctgtgttcaatccagagagcttaaattgtcattattttghknddgaaamctgtatttttgytagtttacaatattatgaaatttcacttcaggagaaactgctgggcttcctgtggctttgttttcttagttactttttccgtgccgtgtattttttaattgatttttcttcttttacttgaaaagaaagtgttttattttcaaatctggtccatatttacattctagttcagagccaagccttaaactgtacagaatttccactgtaattaaaactatttagtgttagttataaatagccttcaaaaagagagattctccattacacgatcacctgcatcacagcccatggtgaatgtatgtttctgcatagcgaaataaaaatggcaaatgcactgaaaaaaaaaaaaa

SEQ ID NO: 231 - DNA, 566 bp, Homo sapiens
  CDS 43..222
  sig_peptide 43..177: Von Heijne matrix score 4 seq ENFLSLLSKSCSA/DP
  polyA_signal 530..535
  polyA_site 555..566
aacgagtggaggtgtggctagtggctgtgatgagataaatccatgcatagccttttcattgcgagcttgaaagttcttttctattacagttttagctttaggtttaattggttcgactgccttctccacaatttgggcgagaatttccttagccttctcagcaaaagttgttctgcggacccgtctgggtcaactttcatgagggacattgagacaaacaaatgaaatatgggttaaagtactctgagcagctacaaaaagaaraccagtctatcctgctggagacagtggccacgtgaaraaagagctcttgcagtatgaaagaccacatggaaagagaggccacatggaaccaacagtcagcatcttggtttcggacacgtgaaraaattcatctcaractgtgtatcctaaatcaggcacttgctgaatctaactacatgagtgagaccagttgacaacacatggagcaracatgagctgttctcagtgartcctacacaaattcctgactcacaacactgtgagcaataaaatggttgttattttaagccaaaaaaaaaaaa

SEQ ID NO: 232 - DNA, 455 bp, Homo sapiens
  CDS 115..231
  sig_peptide 115..180: Von Heijne matrix score 5 seq HLFVTWSSQRALS/HP
  polyA_signal 419..424
  polyA_site 445..455
aacctgccagtkatgcaaatgccaaaatgtgggtcatcatatagtatatttgaaacctttctgaacatgtacaccacccaatgctagaggctgacttggaaaccggtgggtgcaatgcccgaggctgtggaacaatcagcccatctctttgtgacctggagcagtcagagggccctcagtcaccccgccccattcctcaccararaaaaraatccatttctatggaagctctgacgtaacttcagtgttttctacaatactcctcctgccccgccccattaaaacagttcttttgttaaaaaatavcctaatggtccaactttgctgtctgttcttccaaatgtttataatacacattatttataaatatgtctgtttgggaagctaagaacaagctagtttttacaacacaaatggaaataaatgcaattattataaaaatycaaaaaaaaaaa

SEQ ID NO: 233 - DNA, 673 bp, Homo sapiens
  CDS 232..384
  sig_peptide 232..300: Von Heijne matrix score 3.70000004768372 seq FFLCAAFPLGAGV/KM
  polyA_signal 650..655
  polyA_site 662..673
atttggcttgcagactgccttctatcccagaacagctgagaaatctatgaagctgagattctgaaggacccagcttaggttcttccacttaggcctcaattcccttccttttccaggggcagccttagtttcccatggccctgaaacacacacatttcccccttcctttcccagaagccactggccccccatagcacccagtgcatcctttttacaagtggaagaactaggatggctttccaaagtcttctagaaatgaagttctttctctgtgcagctttcccccttggagcaggagtgaagatgtttcattatcttgggcctgggaaaccacttcyycaggcttctccctccccccacccccataggamcaggatttggccttagcttctgggcctatcsgctgccttccctcttyttcctaccacctcttctgccttcctttrawctctgttgggcttggggatcttagttttcttttgtttatttcccatctcatttttttcttctggtcagtttttttaagggggggtgttgtggttttttgtttttgttttgcttctgaaaaarcatttgcctttcttcctctcccaacataacaatcgtggtaacagaatgcgactgctgatttaccgatgtatttaatgtaagtaaaaaaaggaaaaaaaraaaa

SEQ ID NO: 234 - DNA, 639 bp, Homo sapiens
  CDS 143..427
  sig_peptide 143..286: Von Heijne matrix score 7.5 seq FVILLLFIFTVVS/LV
  polyA_signal 606..611
  polyA_site 628..639
aatcgcttcagcagcatcctctcagacaagagccactatttctgattcagatcacctgtcatcgaagtttaaagaaggggaaacaggagacagaaatacactgaaccaaaaagattcaaaagagcaagtggaatctctaagaatggcttccagccactggaatgaaaccactacctctgtttatcagtaccttggttttcaagttcaaaaaatttaccctttccatgacaactggaacactgcctgctttgtcatcctgcttttatttatatttacagtggtatctttagtggtgctggctttcctttatgaagtgcttgamwgctgctgctgtgtaaaaaacaaaaccgtgaaagacttgaaaagtgaacccaaccctcttaraaktatgatggacaacatcagaaaacgtgaaactgaagtggtctaacactctataraaaatgaacaaaatctctgaaagcagctcaacctcttctgaraaaaaaaatatattctgaggccaactgttgctacaaaacaaattctgactgaatggttaaaacatttctagtaraaggggaaaaaaaakttaaacatgcactgtttgtgtgtatasccatttcattaaatatacagtaaaactycaaaaaaaaaaaa

SEQ ID NO: 235 - DNA, 772 bp, Homo sapiens
  CDS 284..463
  sig_peptide 284..379: Von Heijne matrix score 3.79999995231628 seq TFINITLWLGSLC/QR
  polyA_site 762..772
acagctggggctttgtcttctttattgctaggagaatgtagcaatagaagttctcatcgccctgtattgcacttttggttttaaggactggacccagagttcctgaaagccaaactccataagctgctcagtaagttccaagcacatagccggctkhgggatgcgattcggtcgaggtctgttgaatgaaggtagacgcagcaggcagtttgtccttaccagtgacctggaagacggtggcacttcctgagtgagctcacttaccttccctgaatggtgaggcatggatgaatattcctggtggtgccacgtgttagaggtggtaaagggtcaaatgtttacttttattaatattacattatggcttggttctctgtgtcagcgatttttctatgcctcgggtacttatttcctaatatatatcagcacagtaacgcctagctggaggctttgtcttgttagttgataaattagtggtaacaggtagatttggttacctcccaaagtgctgggattrcagacgtgagccaccgcgcctggccgaaacaattcttttgaaagagagaagtctccctgtgttgcgcaggctggtctcagactcctggggtcaagtgagcctcctgctttcgcctcctaaagtgctgggattacaggcgtgagccaccgcacccggacagatgtgttgattttaaagtgggtatgaggcctgagccctggagtttgagaccagcctggacaacatggcaagaccctgtctctccaaaaaaaaaaa

SEQ ID NO: 236 - DNA, 840 bp, Homo sapiens
  CDS 162..671
  sig_peptide 162..398: Von Heijne matrix score 4.09999990463257 seq QGVLFICFTCARS/FP
  polyA_signal 805..810
  polyA_site 830..840
aaaaactgaggcctgggagcaggaacctgtaggcagcgcttgagggtagcgggatagcagctgcaacgcgcgtgggaggcgggggctctgggcggaacaaaaatcacaggatgtcagaggatgtttcccgggaagaactgggataaaggggtcccagcaccatggaggacccgaaccctgaagagaacatgaagcagcaggattcacccaaggagagaagtccccagagcccaggaggcaacatctgccacctgggggccccgaagtgcacccgctgcctcatcaccttcgcagattccaagttccaggagcgtcacatgaagcgggagcacccagcggacttcgtggcccagaagctgcagggggtcctcttcatctgcttcacctgcgcccgctccttcccctcctccaaagccckrrkcacccaccarcgcagccacggtccarccgccaagcccaccctgccggttgcaaccactactgcccarcccaccttcccttgtcctgactgtggcaaaacctttgggcaggctgtttctctgargcggcaccsccaaatrcatgargtccgtgcccctcctggcaccttcgcctgcacaradtgcggtcaggactttgctcargaarcagggctgcatcaacactacattcggcatgcccgggggggactctgagttcagcttaagcctctccacggtgacgggtggctctgtggctggtaggactcacccatgatatggggtgcaggaactctgggggccctgaaggatttgcttccctcccctgggaaggcagagggctcttaataaagaggacccakaagattcttaaaaaaaaaaa

SEQ ID NO: 237 - DNA, 840 bp, Homo sapiens
  CDS 63..632
  sig_peptide 63..308: Von Heijne matrix score 4.40000009536743 seq NLPHLQVVGLTWG/HI
  polyA_signal 808..813
  polyA_site 829..840
aacttccggtcgcgccascgcccgttgccagttctgcgcgtgtcctgcatctccagtatggaatgtatgtdtggccctgtgctgtggtcctggcccagtacctttggtttcacagaagatctctgccaggcaaggccatcttagagattggagctggagtgagccttccaggaattttggctgccaaatgtggtgcagaagtaatactgtcagacagctcagaactgcctcactgtctggaagtctgtcggcaaagctgccaaatgaataacctgccacatctgcaggtggtaggactaacatggggtcatatatcttgggatcttctggctctaccaccacaagatattatccttgcatctgatgtgttctttgaaccagaarattttgaagacattttggctacaatatattttttgatgcacaaraatcccaaggtccaattgtggtctacttatcaagttaggartgctgactggtcacttgaagctttactctacaaatgggatatgaaatgtgtccacattcctcttgagtcttttgatgcagacaaagaaratatagcagaatctacccttccaggaagacatacagttgaaatgctggtcatttcctttgcaaaggacagtctctgaattatacctacaacctgttctgggacagtatcaatactgatgagcaacctggcacacaaactatgagcagaccacttcagcttgagaatgcagtgggtctgaagatggtcaagtctgtttgccttarattttgatgtcacctagacaacacttaaactcatatgaaacaaaaattaaaatacgtattacaagcaaaaaaaaaaaa

SEQ ID NO: 238 - DNA, 849 bp, Homo sapiens
  CDS 21..362
  sig_peptide 21..200: Von Heijne matrix score 4.80000019073486 seq LVILSLKSQTLDA/ET
  polyA_signal 821..826
  polyA_site 838..849
agtaagtccccccgcctcgcatgatggctgcggtgccgccgggcctggagccgtggaaccgtgtgagaatccctaaggcggggaaccgcagcgcagtgacagtgcagaaccccggcgcggcccttgacctttgcattgcagctgtaattaaagaatgccatctcgtcatactgtcgctgaagagccaaaccttagatgcagaaacagatgtgttatgtgcagtcctttacagcaatcacaacagaatgggccgccacaaaccccatttggccctcaaacaggttgagcaatgtttaaagcgtttgaaaaacatgaatttggagggctcaattcaagacctgtttgagttgttttcttccaagtaagtaagtggtccarttgctttgtgatgtggtgggctgggaactcaatgtcttgtgatckcccttwggattkctctakgctygckgttggaatataaccaattataccwcagctgtakaaatwttgttttaatgtggggtaccyggtgtktgtggtaatcttctgacattgatctatgggartgactggtgtgacattgaaatctgggtcatggtagattatattaaaacatcagtgggctgttattgtgcttaactacctcaagttgagcttaaagcaagtcttcacttgaaaactgctatagaaatgctttatatttaaaaatgaaagtaatgggarmttgcacatagctgaaaatgtgaagggtcgcccagggaggamatggaagctctgtgcttcttctgccataccttgccctatgcatctctttgtttcaatcctttgtcatatcctttataataaactggtaaatgtaaaaaaaaaaaa

SEQ ID NO: 239 - DNA, 1344 bp, Homo sapiens
  CDS 21..503
  sig_peptide 21..344: Von Heijne matrix score 5.30000019073486 seq ACMTLTASPGVFP/SL
  polyA_signal 1305..1310
  polyA_site 1330..1341
aaacaactccggaaagtacaatgaccagcgggcaggcccgagcttccwyccagtccccccaggccctggaggactcgggcccggtgaatatctcagtctcaatcaccctaaccctggacccactgaaacccttcggagggtattcccgcaacgtcacccatctgtactcaaccatcttagggcatcagattggactttcaggcagggaagcccacgaggagataaacatcaccttcaccctgcctacagcgtggagctcagatgactgcgccctccacggtcactgtgagcaggtggtattcacagcctgcatgaccctcacggccagccctggggtgttcccgtcactgtacagccaccgcactgtgttcctgacacgtacagcaacgccacgctctggtacaagatcttcacaactgccagagatgccaacacaaaatacgcccaaaattacaatcctttctggtgttataagggggccattggaaaagtctatcatgctttaaatcccaagcttacagtgattgttccagatgatgaccgttcattaataaatttgcatctcatgcacaccagttacttcctctttgtgatggtgataacaatgttttgctatgctgttatcaagggcagacctagcaaattgcgtcagagcaatcctgaattttgtcccgagaaggtggctttggctgaagcctaattccacagctccttgttttttgagagagactgagagaaccataatccttgcctgctgaacccagcctgggcctggatgctctgtgaatacattatcttgcgatgttgggttattccagccaaagacatttcaagtgcctgtaactgatttgtacatatttataaaaatctattcagaaattggtccaataatgcacgtgctttgccctgggtacagccagagcccttcaaccccaccttggacttgaggacctacctgatgggacgtttccacgtgtctctagagaaggatcctggatctagctggtcacgacgatgttttcaccaaggtcacaggagcattgcgtcgctgatggggttgaagtttggtttggttcttgtttcagcccaatatgtagagaacatttgaaacagtctgcacctttgatacggtattgcatttccaaagccaccaatccattttgtggattttatgtgtctgtggcttaataatcatagtaacaacaataatacctttttctccattttgcttgcaggaaacataccttaagttttttttgttttgtttttgtttttttgttttttgttttcctttatgaagaaaaaataaaatagtcacattttaatacyaaaaaaaaaaaamch

SEQ ID NO: 240 - DNA, 671 bp, Homo sapiens
  CDS 1..201
  sig_peptide 1..63: Von Heijne matrix score 5.09999990463257 seq LLLKIWLLQRPES/QE
  polyA_signal 637..642
  polyA_site 660..671
atgctgggaggtgaccatagggctctgcttttaaagatatggctgcttcaaaggccagagtcacaggaaggacttcttccagggagattagtggtgatggagaggagagttaaaaatgacctcatgtccttcttgtccacggttttgttgagttttcactcttctaatgcaagggtctcacactgtgaaccacttaggatgtgatcactttcaggtggccaggaatgttgaatgtctttggctcagttcatttaaaaaagatatctatttgaaagttctcararttgtacatatgtttcacagtacaggatctgtacataaaagtttctttcctaaaccattcaccaagagccaatatctaggcattttcttggtagcacaaattttcttattgcttaraaaattgtcctccttgttatttctgtttgtaaracttaagtgagttaggtctttaaggaaagcaacgctcctctgaaatgcttgtcttttttctgttgccgaaatarctggtcctttttcgggagttaratgtatarartgtttgtatgtaaacatttcttgtaggcatcaccatgaacaaagatatattttctatttatttattatatgtgcacttcaagaagtcactgtcagagaaataaagaattgtcttaaatgtcaaaaaaaaaaaa

SEQ ID NO: 241 - DNA, 1601 bp, Homo sapiens
  CDS 39..1034
  sig_peptide 39..134: Von Heijne matrix score 6.09999990463257 seq LPLLTSALHGLQQ/QH
  polyA_signal 1566..1571
  polyA_site 1587..1597
agccccagatcctgaaggaggtgcagagcccagaggggatgatckcgctgagggacacagctgcctccctccgccttgagagagacacaaggcagttgccactgctcaccagtgccctgcacggactgcagcagcagcacccagccttctctggtgtggcacggctggccaagcggtgggtgcgtgcccagcttcttggtgagggtttcgctgatgagagcctggatctggtggccgctgcccttttcctgcaccctgagcccttcacccctccgagttccccccaggttggcttccttcgattccttttcttggtatcaacgtttgattggaagaacaaccccctctttgtcaacctcaataatgagctcactgtggaggagcaggtggaratccgcagtggcttcctggcagctcgggcacagctccccgtcatggtcattgttaccccccaaraccgcaaaaactctgtgtggacacaggatggaccctcagcccaratcctgcagcagcttgtggtcctggcagctgaasccctgcccatgttararaascagctcatggatccccggggacctggggacatcaggacagkgttccggccgcccttggacatttacgacgtgctgattcgcctgtctcctcgccatatcccgcggcaccgccaggctgtggactcrccagctgcctccttctgccggggcctgctcagccagccggggccctcatccctgatgcccgtgctgggctakgatcctcctcagctctatctgacgcagctcarggaggcctttggggatctggcccttttcttctatgaccagcatggtggagaggtgattggtgtcctctggaagcccaccagcttccagccgcagcccttcaaggcctccagcacaaaggggcgcatggtgatgtctcgaggtggggagctagtaatggtgcccaatgttgaagcaatcctggaggactttgctgtgctgggtgaaggcctggtgcagactgtggaggcccgaagtgagaggtggactgtgtgatcccagctctggagcaagctgtagacggacagcaggacattggacctctagagcaagatgtcagtaggatgacctccaccctccttggacatgaatcctccatggagggcctgctggctgaacatgctgaatcatctccaacaaaacccagccccaactttctctctgatgctccagcattggggcaggggcatggtggcccatgtagtctcctgggcctcaccatcccagaagaggagtgggagccagctcagagaaggaactgaacccaggagatccatccacctattagccctgggcctggacctccctgcgatttcccactcctttcttagtcttcttccagaaacagagaaggggatgtgtgcctgggagaggctctgtctccttcctgctgccaggacctgtgcctagacttagcatgcccttcactgcagtgtcaggcctttagatgggacccagcgaaaatgtggcccttctgagtcacatcaccgacactgagcagtggaaaggggctatatgtgtatgaatagaccacattgaaggagcaaaaaaaaaaamcch

SEQ ID NO: 242 - DNA, 1206 bp, Homo sapiens
  CDS 69..263
  sig_peptide 69..125: Von Heijne matrix score 3.90000009536743 seq ALSMSSFSFHSSS/CS
  polyA_signal 1173..1178
  polyA_site 1196..1205
acatttgtgactttaccaataccctcccagttcttgatagacagctgtaggttgctgggttcaagaatatgggtgggatatggaatgctctttcaatgtctagcttcagttttcattcatcctcctgctcagcactgtcagccaagagcttactcagcagacaccacatactgcagcagttcctagtgagaaaatctgtgccactagaaaatgcttcacttccatttcctcacctgggcagttctctgtttaaaattgtgggctgatttggtcttcctctcctcctcccactgttactgccctgcagcccttgttcaggtgtacagacccttattctggcctctagtgtccttgtctgtcatgacacacccttccgcccaaatacctctgaccccaaggctggaatggggctggtaggarataagtttgcttactcatartcatgtcctttctcttggcacctgcttccctgcggtgtcctcaaatggatttctgtgtggcagtggartgattgcatgaatttttctgtaacacattaactttgtattattattaagggartttgaraaagctttgcttataatgtcaaggcaaggaggtaaaaactggagcccaaakaaattcccttagggcaagattatgttataataraaaattgaatttcctgaggcagtggctgccaccccttttcaratgtttagtcctgcaaatagcatctttcttgtagtctgtgacatggatggggatgctagggcccttaggggcaaggggactaaactaaatcaakttgagtttttttccagcaggggttargggaggtactcsctgttgatatttgacactaraaagtaatcttttttacaaaactgtttttctaggtgggtggaaagtgaaactgccacatccttgttggtttagtccaararatcatttgcaacaacagtaratgtccgggttttgtttctgtctttttattatgaaaaactatgttaagggggaaaatgtggattatggtaaccaraggaatccctasccttgttttccttaraaracttgtttagtgttttatcaracgtctgttgtagttgtaracaggaaagcttgtgaraaaaacaccacatggascctgtaaatgtttttgcacaacctgtaaagcattcttggaaktggccagtaaaaaggggttttaccatttaaaaaaaaaat

SEQ ID NO: 243 - DNA, 536 bp, Homo sapiens
  CDS 115..285
  sig_peptide 115..204: Von Heijne matrix score 3.70000004768372 seq SMMLLTVYGGYLC/SV
  polyA_signal 505..510
  polyA_site 525..536
acgagtgctgcgttcggctgtgctgggaagttgcgtagacagtggcctcgagaccctgcctgcctgaggaggcctcggttggatgcgaaggagctgcagcatccaggggacaagatgccaactggcaagcagctagctgacattggctataagaccttctctacctccatgatgcttctcactgtgtatggggggtacctctgcagtgtccgagtctaccactatttccagtggcgcagggcccagcgccaggccgcagaagaacagaagdactcaggaatcatgtagaactggggggctttttctcctgagcarasakgcccaaggcatgctgtggagagacttcacctgccaccatttccaggtcaacaggactagagcgttgatggttttcaaaccctgttggaagaaagtgcccatggtttctctggttctgccartttgacagtttatggargcttttgaatcgtaatarcaatgtgagggtgargtacacctacagacattaaataatttgctgtgtcaaaaaaaaaaaa

SEQ ID NO: 244 - DNA, 529 bp, Homo sapiens
  CDS 90..344
  sig_peptide 90..140: Von Heijne matrix score 8.19999980926514 seq LLLITAILAVAVG/FP
  polyA_signal 500..505
  polyA_site 515..527
aatatraracagctacaatattccagggccartcacttgccatttctcataacagcgtcagagagaaagaactgactgaracgtttgagatgaagaaagttctcctcctgatcacagccatcttggcagtggctgtwggtttcccagtctctcaagaccaggaacgagaaaaaagaagtatcagtgacagcgatgaattagcttcaggrwtttttgtgttcccttacccatatccatttcgcccacttccaccaattccatttccaagatttccatggtttagacgtaattttcctattccaatacctgaatctgcccctacaactccccttcctagcgaaaagtaaacaaraaggaaaagtcacrataaacctggtcacctgaaattgaaattgagccacttccttgaaraatcaaaattcctgttaataaaaraaaaacaaatgtaattgaaatagcacacagcattctctagtcaatatctttagtgatcttctttaataaacatgaaagcaaaaaaaaaaaaacc

SEQ ID NO: 245 - DNA, 493 bp, Homo sapiens
  CDS 57..311
  sig_peptide 57..107: Von Heijne matrix score 8.19999980926514 seq LLLITAILAVAVG/FP
  polyA_signal 467..472
  polyA_site 482..493
aacttgccatttctcataacagcgtcagagagaaagaactgactgaaacgtttgagatgaagaaagttctcctcctgatcacagccatcttggcagtggctgttggtttcccagtctctcaagaccakgaacgagaaaaaagaagtatcagtgacagcgatgaattagcttcagggttttttgtgttcccttacccatatccatttcgcccacttccaccaattccatttccaagatttccatggtttagacgtaattttcctattccaatacctgaatctgcccctacaactccccttccgagcgaaaagtaaacaagaaggaaaagtcacgataaacctggtcacctgaaattgaaattgagccacttccttgargaatcaaaattcctgttaataaaagaaaaacaaatgtaattgaaatagcacacagcattctctagtcaatatctttagtgatcttctttaataaacatgaaagcaaaaaaaaaaaa

SEQ ID NO: 246 - DNA, 521 bp, Homo sapiens
  CDS 96..302
  sig_peptide 96..182: Von Heijne matrix score 5 seq ELSLLPSSLWVLA/TS
  polyA_site 501..514
aagagacgtcaccggctgcgcccttcagtatcgcggacggaagatggcgtccgccacccgtctcatccagcggctgcggaactgggcgtccgggcatgacctgcaggggaagctgcagctacgctaccaggagatctccaagcgaactcagcctcctcccaagctccctgtgggtcctagccacaagctctccaacaattactattgcactcgcgatggccgccgggaatctgtgcccccttccatcatcatktcgtcrcaaaaggcgctggtgtcaggcaasccarcaaaragctctgctgtagctgccactgaaaaraaggcggtgactccagctcctcccataaagaggtgggagctgtcctcggaccagccttacctgtgacactgcaccctcacggccacccgactactttgcctccttggatttcctccagggagaatgtgacctaatttatgacaaatacgtaragctcaggtatcacttctagttttactttaaaaaataaaaaaatagagac

SEQ ID NO: 247 - DNA, 811 bp, Homo sapiens
  CDS 161..526
  sig_peptide 161..328: Von Heijne matrix score 4.19999980926514 seq XSPLLTLALLGQC/SL
  polyA_site 799..811
aaaaaattgcagtgctgaagacactggacccgcaaaaggctgtccctcccaaacctgggattctgggctcactgagttcacctgcgagtcagccctacctgcactgctctggtctagtacaaacaggctgctggcattgaggtctgctacaaaaanartaatggtcccatggcccaggggcaaggtgaaaactgctcctattcccatctctaggtttcctttcctccctacccacgacccacccaccccagcacattggtctccagcatctcatcagcagtttaaacatkkgtcacccctcctcactttggccctgctgggtcagtgctctctgttcarcaatttgaggaaaaaacttgcagggcaaaaagcaaaaaaattaccttccttctccagcctgcccctgacactctggccattaactcctcaatttgctgagctcactacagtggcacaaaaaaaattgaggtggtccgggaccctaggttggggtccagttcccagctgggttcaattttttttagggtgaatggagggaragttggggactgaaaasccttcaaaracaatgttattacagcaktctccccttatccaaaktttccttttcctgadtttcagttagctatggtcaaccgcttggaaaatakttgaacacagtacaataaratattttgaggctgggaktggtggctcatgcctgtaataatcccaggactttgtgaraccaaktttgaaggatcacttgaacccaggaktttgaraccascctgggcaacatrgtragacctcatctctacaaaaaaaaaaa

SEQ ID NO: 248 - DNA, 625 bp, Homo sapiens
  CDS 210..332
  sig_peptide 210..299: Von Heijne matrix score 8.10000038146973 seq ITCLLAFWVPASC/IQ
  polyA_signal 594..599
  polyA_site 613..625
acaggtcsmcttaacatctcttgatttgagccactcccactgtcatcagctttcacctggattatcgtgacagcctcctactgcttctctatcatgtggccagagctatcttccctaaaaatgcattgcatagttgatcaagtcactctctggcctaaaaccttccttggctccctgctgccctcaggataaagtctggacccctcagcatggcttgtgagactcatggtgtccttgtccctgctcacctctctggtctcatcacttgccttcttgcattctgggtcccagcctcctgtatccagagatgcagtggctctccattgccactctgattcctcctttcttttggtcacagagaaagggtactttctctgtcaaatctcaacttagacttgacttcctccaaggagctttggctatactctctcccwcgacccccaccctggcatactacacaratcactctgggctcacttgcctgcctaatggtcatctccccagtaaactgtaagctccttgagggcaaggattgtgttggaatttttgtattaacagtgcctggcttggtgcctggcacctaaaaagcactcaataaatgtttgtttaatgaaaaaaaaaaaaa

SEQ ID NO: 249 - DNA, 684 bp, Homo sapiens
  CDS 212..361
  sig_peptide 212..319: Von Heijne matrix score 4.09999990463257 seq HWLFLASLSGIKT/YQ
  polyA_signal 650..655
  polyA_site 673..684
atccccawnscactctctcacagagactgttcttttccttctgagaccctactccagcttgtagttctaaatctgtgattatgcactgtctgtcttcctcttgaggtcaggggccatttcttttgttctctgctatgctcaggacccagatcaaaggagctcagtaactatttacaggcgtacatcatatgtggaggacacttatgctgtgatggccccacacacagcttcctttggggtctgtcccctgctctccgttacccgcgtggtagccactgagcactggctcttcctggcttcactctctggcatcaaaacttatcagtcctacatctcagtcttttgcaaggtgacacttatctgattacctaattcacacraaggtgttaatggtggtaatggcataktatttattaccccaggggacccakaacggtggtatcaaaacatatcattccccagtggtttaaaactctggtagctttccarggaatccaaagtggaatccagtctccttagctgawttcacagggccccgtctgcacaacttggcttctgtcggcttccctanccctgacttcccaagccttagtcatcaccctctctcccacccagggctcagcacagtacctggaacagtcaagccctcaataaatgtttactgagtgcatyaaaaaaaaaaaa

SEQ ID NO: 250 - DNA, 628 bp, Homo sapiens
  CDS 75..482
  sig_peptide 75..128: Von Heijne matrix score 3.59999990463257 seq KMLISVAMLGAXA/GV
  polyA_signal 595..600
  polyA_site 618..627
aagtgagaccgcgcggcaacagcttgcggctgcggggagctcccgtgggcgctccgctggctgtgcaggcggccatggattccttgcggaaaatgctgatctcagtcgcaatgctgggcgcargggctggcgtgggctacgcgctcctcgttatcgtgaccccgggagagcggcggaagcaggaaatgctaaaggagatgccactgcaggacccaaggagcagggaggaggcggccaggacccagcagctattgctggccactctgcaggaggcagcgaccacgcaggagaacgtggcctggaggaagaactggatggttggcggcgaaggcggcgccacgggakgtcaccgtgagaccggacttgcctccgtgggcgccggaccttggcttgggcgcaggaatccgaggcagctttctccttcgtgggcccancggaaaatccggamcgaaaatwccatgccaggactctccggggtcctgtgaactgccgtcgggtgagcacgtgtcccccaaaccctggactgactgctttaaggtccgcaaggcgggccagggccgagacgcgagtcggatgtggtgaactgaaagaaccaataaaatcatgttcctccammcaaaaaaaaaah

SEQ ID NO: 251 - DNA, 813 bp, Homo sapiens
  CDS 50..631
  sig_peptide 50..244: Von Heijne matrix score 8 seq LTLIGCLVTGVES/KI
  polyA_signal 777..782
  polyA_site 801..812
aaggaaaggattactcgagccttgttagaatcagacatggcttcaggggatgcaggacgctcccctgagctgcctgtcaccgactaagtggagcagtgtttcttccgcagactcaactgagaagtcagcctctgcggcaggcaccaggaatctgccttttcagttctgtctccggcaggctttgaggatgaaggctgcgggcattctgaccctcattggctgcctggtcacaggcgtcgagtccaaaatctacactcgttgcaaactggcaaaaatattctcgagggctggcctggacaatcygaggggcttcagccttggaaactggatctgcatggcgtattatgagagcggctacaacaccacagcccaracggtcctggatgacggcagcatcgactayggcatcttccaaatcaacagcttcgcgtggtgcagacgcggaaagctgaaggagaacaaccactgccaygtcgcctgctcagccttgrtcactgatgacctcacagatgcaattatctgtgccargaaaattgttaaagagacacaaggaatgaactattggcaaggctggaagaaacaytgtgaggggagagacctgtccgastggaaaaaaggctgtgaggtttcctaaactggaactggacccaggatgctttgcascaacgccctagggtttgcagtgaatgtccaaatgcctgtgtcatcttgtcccgtttcctcccaatattccttctcaaacttggagagggaaaattaagctatacttttaagaaaataaatatttccatttaaatgtcaamaaaaaaaaah

SEQ ID NO: 252 - DNA, 778 bp, Homo sapiens
  CDS 154..576
  sig_peptide 154..360: Von Heijne matrix score 4.80000019073486 seq MMVLSLGIILASA/SF
  polyA_signal 737..742
  polyA_site 763..775
agtaaaaaaacactggaataaggaagggctgatgactttcagaagatgaaggtaagtagaaaccgttgatgggactgagaaaccagagtkaaaacctctttggagcttctgaggactcagctggaaccaacgggcacagttggcaacaccatcatgacatcacaacctgttcccaatgagaccatcatagtgctcccatcaaatgtcatcaacttctcccaagcagagaaacccgaacccaccaaccaggggcaggatagcctgaagaaacatctacacgcagaaatcaaagttattgggactatccagatcttgtgtggcatgatggtattgagcttggggatcattttggcatctgcttccttctctccaaattttacccaagtgacttctacactgttgaactctgcttacccattcataggacccttttttgtraktaaabtttctgaggagggcaggatggggcaaaraggggaggaaratvccaatagcttaaacttcccasctgccagcttgctatktttgatctgccaggavcaaggattcaacggtgaatcttgttctcctgtcgggtargataacaggggttgcttrattttagatcaatttcttatcagactcaaataaacatttcttttgaaaatcatcttattcttcacattatcatcttgagctatgatggaaactagtgasktctctccaggtttaggcgaaaaaaaaatccatgaattaggataaagttgggaaggaacattttatacaaaaaaaaaaahcc

SEQ ID NO: 253 - DNA, 1060 bp, Homo sapiens
  CDS 154..897
  sig_peptide 154..360: Von Heijne matrix score 4.80000019073486 seq MMVLSLGIILASA/SF
  polyA_signal 1017..1022
  polyA_site 1044..1054
agtaaaaaaacactggaataaggaagggctgatgactttcagaagatgaaggtaagtagaaaccgttgatgggactgagaaaccagagtkaaaacctctttggagcttctgaggactcagctggaaccaacgggcacagttggcaacaccatcatgacatcacaacctgttcccaatgagaccatcatagtgctcccatcaaatgtcatcaacttctcccaagcagagaaacccgaacccaccaaccaggggcaggatagcctgaagaaacatctacacgcagarrtcaaagttattgggactatccagatcttgtgtggcatgatggtattgagcttggggatcattttggcatctgcttccttctctccaaattttacccaagtgacttctacactgttgaactctgcttacccattcataggaccctttttttttatcatctctggctctctatcaatcgccacaaaaaaaaggttaaccaaccttttggtgcataccaccctggttggaagcattctgagtgctctgtctgccctggtgggtttcattaycctgtctgtcaaacaggccaccttaaatcctgcctcactgcaktgtgagttggmcaaaaataatataccaacaaraakttatgttycttacttttatcatgattcactttataccacggackgctatacagccaaagccaktctggctggaactctctctctgatgctgatttgcactctgctggaattctgccwasctgtgctcactgctgtgctgcggtggaaacaggcttactctgacttccctgggagtgtacttttcctgcctcamagttacattggwaattctggmatgtcctcaaaaatgacycatgactgtggatatgaagaactattgacttcttaagaaaaaagggagaaatattaatcagaaagttgattcttatgataatatggaaaagttaaccattatagaaaagcaaagcttgagtttcctaaatgtaagcttttaaagtaatgaacattaaaaaaaaccattatttcactgtcaaaaaaaaaaamccnkt

SEQ ID NO: 254 - DNA, 444 bp, Homo sapiens
  CDS 146..292
  sig_peptide 146..253: Von Heijne matrix score 5.5 seq FTSMCILFHCLLS/FQ
  polyA_signal 395..400
  polyA_site 433..444
aacttgggacaagaratcaaactttaaagatggtctaaagcccctcttaaaggtctgactgtgtcggacctctagagctaatctcactagatgtgagccattgtttatattctagccatcctttcatttcattctagaagaccccatgcaagttccccacctaagggtctggacacaggtgawagataccttcattggttatagaaatttgggatttacaagtatgtgcatattgttccactgtcttcttagctttcaggttttcaaaaagaaaagaaaacttaracttttctgatgttcttttttacgtaaataaccattttattgttgttttgctttttctgccttcaaactactcccacaggccaaatatavctggctgcttctttctgtaaataaagttttattgggccacagccatggccatcttttaaaaaaaaaaaa

SEQ ID NO: 255 - DNA, 754 bp, Homo sapiens
  CDS 126..383
  sig_peptide 126..167: Von Heijne matrix score 7.5 seq VALNLILVPCCAA/WC
  polyA_signal 726..731
  polyA_site 743..754
aattgtatgttacgatgttgtattgatttttaagaaagtaattkratttgtaaaacttctgctcgtttacactgcacattgaatacaggtaactaattggwwggagaggggaggtcactcttttgatggtggccctgaacctcattctggttccctgctgcgctgcttggtgtgacccacggaggatccactcccaggatgacgtgctccgtagctctgctgctgatactgggtctgcgatgcagcggcgtgaggcctgggctggttggagaaggtcacaacccttctctgttggtctgccttctgctgaaagactcgagaaccaaccagggaagctgtcctggaggtccctggtcggagagggacatagaatctgtgacctctgacrrctgtgaasccaccctgggctacaraaaccacagtcttcccagcaattattacaattcttgaattccttggggattttttactgccctttcaaagcacttaaktgtkrratctaacgtkttccagtgtctgtctgaggtgacttaaaaaatcagaacaaaacttctattatccagagtcatgggagagtacaccctttccaggaataatgttttgggaaacactgaaatgaaatcttcccagtattataaattgtgtatttaaaaaaaagaaacttttctgaatgcctacctggcggtgtataccaggcagtgtgccagtttaaaaagatgaaaaagaataaaaacttttgaggaaaaaaaaaaaa

SEQ ID NO: 256 - DNA, 629 bp, Homo sapiens
  CDS 66..497
  sig_peptide 66..239: Von Heijne matrix score 5.40000009536743 seq QLLDSVLWLGALG/LT
  polyA_signal 594..599
  polyA_site 618..629
aactcccagaatgctgaccaaagtgggaggagcactaggtcttcccgtcacctccacctctctccatgacccggctctgcttacccagacccgaagcacgtgaggatccgatcccagttcctccaaggggcctgggtgctggggaggggtcaggtagtccagtgcgtccacctgtatccacctggggccctagctgggcccagctcctggacagtgtcctatggctgggggcactaggactgacaatccaggcagtcttttccaccactggcccagccctgctgctgcttctggtcagcttcctcacctttgacctgctccataggcccgcagtcacactctgccacagcgcaaacttctcaccaggggccagagtcagggggccggtgaaggtcctggacagcaggaggctctactcctgcaaatgggtacagtctcaggacaacttagcctccaggaagcactgctgctgctgctcatggggctgggcccgctcctgaaaacctgtggcatgcccttgwaccctgcttggcctggctttctgcctccatccttgggcctgakancccctccccacaactcagtgtccttcaaatatacaatgaccacccttcttcaaaaaaaaaaaa

SEQ ID NO: 257 - DNA, 765 bp, Homo sapiens
  CDS 49..411
  sig_peptide 49..96: Von Heijne matrix score 10.1000003814697 seq LVLTLCTLPLAVA/SA
  polyA_signal 732..737
  polyA_site 750..763
aaagatccctgcagcccggcaggagagaaggctgagccttctggcgtcatggagaggctcgtcctaaccctgtgcaccctcccgctggctgtggcgtctgctggctgcgccacgacgccagctcgcaacctgagctgctaccagtgcttcaaggtcagcagctggacggagtgcccgcccacctggtgcagcccgctggaccaagtctgcatctccaacgaggtggtcgtctcttttagtgagtcycccccgggcagagggcasgtgccabgtgccggggaakggccggtgcccccgcctctcwkcgacttabctatgactcctcggckcyccagggcctggggccckgtgggtccdaaagtgcctcctgctgtctctcccgcgctgggctcgggcgagcatccsrvabtgtgaatkkkgacttttttctcckccatttgaagtgtcactaggaactgtcagcaggacaaaggctctgatgtcactgaatttacaaaracagcaggaacrsackggtggggatgggcagctgttcrargcratgggtkatctgcccttcctggcacagcacartacacctgccatacaacccarcatcaggcakgctgcactggaatcgatacagtgtatgacaatgtcatatagtataacacaacataatgaatataacgtgtatattgcaacttaatataatacgatgtaatataatgctacataatacaacataatataataaaatagaatgcaacacaaaaaaaaaaaacc

SEQ ID NO: 258 - DNA, 623 bp, Homo sapiens
  CDS 49..534
  sig_peptide 49..96: Von Heijne matrix score 10.1000003814697 seq LVLTLCTLPLAVA/SA
  polyA_signal 593..598
  polyA_site 612..623
aaagatccctgcagcccggcaggagagaaggctgagccttctggcgtcatggagaggctcgtcctaaccctgtgcaccctcccgctggctgtggcgtctgctggctgcgccacgacgccagctcgcaacctgagctgctaccagtgcttcaaggtcagcagctggacggagtgcccgcccacctggtgcagcccgctggaccaagtctgcatctccaacgaggtggtcgtctcttttaaatggagtgtacgcgtcctgctcagcaaacgctgtgctcccagatgtcccaacgacaacatgaakttcgaatggtcgccggcccccatggtgcaaggcgtgatcaccaggcgctgctgttcctgggctctctgcaacagggcactgaccccacaggaggggcgctgggccctgcraggggggctcctgctccaggacccttcgaggggcaraaaaacctgggtgcggccacagctggggctcccactctgccttcccawttccaaccccctctgcccargggaaacccaggaaggataacactgtgggtgcccccacctgtgcattgggaccacracttcaccctcttggaracaataaactctcatgcccccaaaaaaaaaaaa

SEQ ID NO: 259 - DNA, 571 bp, Homo sapiens
  CDS 86..415
  sig_peptide 86..145: Von Heijne matrix score 9.80000019073486 seq FTIGLTLLLGXQA/MP
  polyA_signal 540..545
  polyA_site 560..571
aaaaactcacccagtgagtgtgagcatttaagaagcatcctctgccaagaccaaaaggaaagaagaaaaabggccaaaagccaaaatgaractgatggtacttgttttcaccattgggctaactttgctgctaggarttcaagccatgcctgcaaatcgcctctcttgctacagaaagatactaaaagatcacaactgtcacaaccttccggaaggagtagctgacctgacacagattgatgtcaatgtccaggatcatttctgggatgggaagggatgtgagatgatctgttactgcaacttcaagcgaattgctctgctgcccaaaagacgttttctttggaccaaagatctctttcgtgattccttgcaacaatcaatgagaatcttcatgtattctggcgaacaccattcctgatttcccacaaactgcactacatcagtataactgcatttctagtttctatatagtgcaatagagcatagattctataaattcttacttgtctaagaaagtaaatctgtgttaaacaagtagtaataaaagttaattcaatccaaaaaaaaaaaa

SEQ ID NO: 260 - DNA, 612 bp, Homo sapiens
  CDS 56..268
  sig_peptide 56..100: Von Heijne matrix score 4.59999990463257 seq LLTHNLLSSHVRG/VG
  polyA_signal 584..589
  polyA_site 601..612
ctaatcgaaaagggggattttccggttccggcctggcgagagtttgtgcggcgacatgaaactgcttacccacaatctgctgagctcgcatgtgcggggggtggggtcccgtggcttccccctgcgcctccaggccaccgaggtccgtatctgccctgtggaattcaaccccaacttcgtggcgcgtatgatacctaaagtggagtggtcggcgttcctggaggcgrmcgataacttgcgtctgatccaggtgccgagaagggccggttgagggatatgaggagaatgaggagtttctgaggaccatgcaccacctgctgctggaggtggamstgakagagggcaccctgcagtgcccggaatctggacgtatgttccccatcagccgcgggatccccaacatgctgctgagtgaagaggaaactgagagttgattgtgccaggcgccagtttttcttgttatgactgtgtatttttgttgatctataccctgtttccgaattctgccgtgtgtatccccaacccttgacccaatgacaccaaacacagtgtttttgagctcggtattatatatttttttctcattaaaggtttaaaaccaaaaaaaaaaaa

SEQ ID NO: 261 - DNA, 539 bp, Homo sapiens
  CDS 32..328
  sig_peptide 32..103: Von Heijne matrix score 4.59999990463257 seq FFIFCSLNTLLLG/GV
  polyA_signal 508..513
  polyA_site 528..539
aacaactatcctgcctgctgcttgctgcaccatgaagtctgccaagctgggatttcttctaagattcttcatcttctgctcattgaataccctgttattgggtggtgttaataaaattgcggagaagatatgtggagacctcaaagatccctgcaaattggacatgaattttggaagctgctatgaagttcactttagatatttctacaacagaacctccaaaagatgtgaaacttttgtcttctccagctgtaatggcaaccttaacaacttcaagcttaaaatagaacgtgaagtakcctgtgttgcaaaatacaaaccaccgaggtgagaggatgtgaactcatgaagttgtctgctgcaccatccgaaataaagacacaagaaaattcaractgatttwgaaatctttgttwtatttccmymakggcgwktaagcttccatatgtttgctattttcctgaccctagttttgtctttcctggaaattaactgtatgakcattasaatgaaagagtctttctgtcaaaaaaaaaaaa

SEQ ID NO: 262 - DNA, 964 bp, Homo sapiens
  CDS 21..527
  sig_peptide 21..95: Von Heijne matrix score 8.5 seq LKVLLLPLAPAAA/QD
  polyA_signal 921..926
  polyA_site 953..963
agggcggatcttctccggccatgaggaagccagccgctggcttccttccctcactcctgaaggtgctgctcctgcctctggcacctgccgcagcccaggattcgactcaggcctccactccaggcagccctctctctcctaccgaataccaacgcttcttcgcactgctgactccaacctggaaggcagaractacctgccgtctccgtgcaacccacggctgccggaatcccacactcgtccagctggaccaatatgaaaaccacggcttagtgcccgatggtgctgtctgctccaacctcccttatgcctcctggtttgagtctttctgccagttcactcactaccgttgctccaaccacgtctactatgccaagagagtcctgtgttcccagccagtctctattctctcwcctaacactctcaaggagatagaascttcagctgaagtctcacccaccacagatgacctcccccatctcaccccacttcacagtgacagaacgccagaccttccagccctggcctgagaggctcagcaacaacgtggaagagctcctacaatcctccttgtccctgggaggccaggagcaagcgccagagcacaagcaggagcaaggagtggagcacaggcaggagccgacacaagaacacaagcaggaagaggggcagaaacaggaagagcaagaagaggaacaggaagaggagggaaagcaggaagaaggacaggggactaaggagggacgggaggctgtgtctcagctgcagacagactcagagcccaagtttcactctgaatctctatcttctaacccttcctcttttgctccccgggtacganaagtagagtctactcctatgataatggagaacatccaggagctcattcgatcagcccaggaaatagatgaaatgaatgaaatatatgatgagaactcctactggagaaaccaaaaaaaaaaak

SEQ ID NO: 263 - DNA, 684 bp, Homo sapiens
  CDS 147..647
  sig_peptide 147..374: Von Heijne matrix score 3.5 seq LASASELPLGSRP/AP
  polyA_site 668..681
aacttcctgtgagcccggcggtgacaacggcaacatggcccgtgaacggagctgaagtcgacgacttctcctrgrarmccccgactgaggcggagacgaaggtgctgcaggcgcgacgggagcggcaagatcgcatctcccggctcatgggcgactatctgctgcgcggttaccgcatgctgggcgagacgtgtgcggactgcgggacgatcctcctccaagacaaacagcggaaaatctactgcgtggcttgtcaggaactcgactcagacgtggataaagataatcccgctctgaatgcccaggctgccctctcccaagctcgggagcaccagctggcctcagcctcagagctccccctgggctctcgacctgcgccccaacccccagtacctcgtccggagcactgtgagggagctgcagcaggactcaaggcagcccaggggccacctgctcctgctgtgcctccaaatacaratgtcatggcctgcacacagacagccctcttgcaaaagctgacctgggcctctgctgaactgggctctancacctcccygggaaaamtagcatccagctgtgtggccttatccgcgcatgtgcggaggccctgcgcagcctgcagcagctacagcactaagagaagcccctgagaaaaacctctagaaaaacaaaaaaaaaaaaccc

SEQ ID NO: 264 - DNA, 693 bp, Homo sapiens
  CDS 262..471
  sig_peptide 262..306: Von Heijne matrix score 3.5 seq LCFLLPHHRLQEA/RQ
  polyA_signal 663..668
  polyA_site 682..693
atttcgcggcgctcgcbgmacyhsgwtgttcagcaccttcggtccggttgaggttgtcaagtcggmccaaacaggttgtttctctgcagtttccaacatggcagggmsgtttaatagacatggataagaagtccactcacagaaatcctgaagatgccagggctggcaaatatgaaggtaaacacaaacgaaagaaaagaagaaagcaaaaccaaaaccagcaccgatcccgacatagatcagtgacgtctttttcttcagatgatcctatgtttccttcttcctcatcatcgtcttcaggaagccagacagattcaagtattgaagatgcttccaagggaaaaattaagaagaagagaagagagaaaacaaataaatgggaaaaaaraaaggacaaaatatgaaacaccaagaaaargaraaggaaaaaaaggaggaaacmaccmcwtwtktcmcctttccaaragggactgaaactgggctgacccttttgatttccaavctcascgttttggtgtaaggcggccaaaraaggatgcggascccagcactgtgaagcctacaaaaacattgatgcgctggcttggggatttgaatttgaacatctttcacactaagttcagactcatgaaaccaatcttcagatgctctgtaaaccacataataaagagtttggaaattaaaaaaaaaraa

SEQ ID NO: 265 - DNA, 1656 bp, Homo sapiens
  CDS 74..1216
  sig_peptide 74..172: Von Heijne matrix score 5.80000019073486 seq XLCLGMALCPRQA/TR
  polyA_signal 1627..1632
  polyA_site 1640..1652
atctcttggcgtctcaacgttcggatcagcagcttttttccattctctctctccacttcttcagtgagcagccatgagttggactgtgcctgttgtgcgggccagccagagagtgagctcggtgggagcgaatktcctatgcctggggatggccctgtgtccgcgtcaagcaacgcgcatcccgctcaacggcacctggctcttcacccccgtgagcaagatggcgactgtgaaragtgagcttattgagcgtttcacttccgaraagcccgttcatcacagtaaggtctccatcataggaactggatcggtgggcatggcctgcgctatcagcatcttattaaaaggcttgagtgatgaacttgcccttgtggatcttgatgaaracaaactgaagggtgagacratggatcttcaacatggcagccctttcacgaaaatgccaaatattgtttgtagcaaarattactttgtcacagcaaactccaacctagtgattatcacagcaggtgcacgccaaraaaagggagaaacgcgccttaatttastccagcgaaatgtggccatcttcaagttaatgatttccagtattgtccagtacagcccccactgcaaactgattattgtttccaatccagtggatatcttaacttatgtagcttggaagttgagtgcatttcccaaaaaccgtattattggaagcggctgtaatctgatamhggctcgttttcgtttcttgattggacaaaagcttggtatccattctgaaagctgccatggatggatcctcggagagcatggagactcaagtgttcctgtgtggagtggagtgaacatagctggtgtccctttgaaggatctgaactctgatataggaactgataaagatcctgagcaatggaaaaatgtccacaaagaagtgactgcaactgcctatgagattattaaaatgaaaggttatacttcttgggccattggcctatctgtggccgatttaacagaaagtattttgaagaatcttaggagaatacatccagtttccaccataactaagggcctctatggaataratgaagaagtattcctcagtattccttgtatcctgggagagaacggtattaccaaccttataaagataaagctgacccctgaagaagaggcccatctgaaaaaaagtgcaaaaacactctgggaaattcagaataagcttaagctttaaagttgcctaaaactaccattccgaaattattgaagagatcatagatacaggattatataacgaaattttgaataaacttgaattcctaaaagatggaaacaggaaagtaggtagagtgattttcctatttatttagtcctccagctcttttattgagcatccacgtgctggacgatacttatttacaattcckaagtatttttggtacctctgatgtagcagcacttgccatgttatatatatgtagttgrmatttggttcccaaaaagtaggatgtaggtatttattgtgttctagaaattccgactcttttcattagatatatgctatttctttcattcttgctggtttatacctatgttcatttatatgctgtaaaaaagtagtagcttcttctacaatgtaaaaataaatgtacatacaaaaaaaaaaamcmc

SEQ ID NO: 266 - DNA, 517 bp, Homo sapiens
  CDS 48..164
  sig_peptide 48..89: Von Heijne matrix score 4 seq YYMVCLFFRLIFS/EH
  polyA_signal 482..487
  polyA_site 505..517
aggagatagcctcgtagaaatgacaaccacaatgttaatactaacatatgtattacatggtttgtttgttctttcgcttaatattttcagagcacctacctattataggcactgtcacttctcacaaaactgggacactaactgtttatccaacatctgctggctaaataaagacatgatcttcaccttttgggattgttaatttaaaatggttccataagagcaatgcaaagacagagatatttggcagcactgcagctggtgatttatatggctcttcacaaggtgttattttggggtatcaaggtatggatgcttaaatcagctgcaggaagtaagaaagaagaaaaaaggagtgataaagataaaaaaaaatcaaccttggtccttccaccaaaacccattaatttccatatcatcatctgcataararggaaaattcctacwtgaccaggttactgcaaggatktkaattttgaatattaaaatattatmcmcaattggaaaaaaaaaaaaa

SEQ ID NO: 267 - DNA, 405 bp, Homo sapiens
  CDS 185..334
  sig_peptide 185..295: Von Heijne matrix score 5.90000009536743 seq LSYASSALSPCLT/AP
  polyA_signal 355..360
  polyA_site 392..405
atcaccttcttctccatccttstctgggccagtccccarcccagtccctctcctgacctgcccagcccaagtcagccttcagcacgcgcttttctgcacacagatattccaggcctacctggcattccaggacctccgmaatgatgctccagtcccttacaagcgcttcctggatgagggtggcatggtgctgaccaccctccccttgccctctgccaacagccctgtgaacatgcccaccactggccccaacagcctgagttatgctagctctgccctgtccccctgtctgaccgctccaaagtccccccgacttgctatgatgcctgacaactaaatatccttatccaaatcaataaarwraraatcctccctccaraagggtttctaaaaacaaaaaaaaaa

SEQ ID NO: 268 - DNA, 1087 bp, Homo sapiens
  CDS 195..347
  sig_peptide 195..272: Von Heijne matrix score 7.09999990463257 seq LASLQWSLTLAWC/GS
  polyA_signal 1037..1042
  polyA_site 1071..1082
aaagtgtagaacacggacctctgagttatgctcttgagaggtgccaaagctgggctgtttacctaccttatccacagagctctgaaagtcaagccagaaaggaaggattccaaattcttggaattttatctagaaaagaagactaagcagcttttgttcttctgtgacccagttgctggcccaagacatggacaatgaccccctggtgtttggcgtgtctggggaggaggcctctcgcttctttgcagtggagcctgacactggcgtggtgtggctccggcagccactggacagagagaccaaktcagakttcaccgtggakttctctgtcagcgaccaccagggggtgatcacacggaaggtgaacatccaggtcggggatgtgaatgacaacgcgcccacatttcacaatcagccctacagcgtccgcatccctgaraatacaccagtggggacgcccatcttcatcgtgaatgccacagaccccgacttgggggcagggggcagcgtcctctactccttccagcccccctcccaattcttcgccattgacagcgcccgcggtatcktcacagtgatccgggagctggactacgataccacrcmggcctaccagctcwcggtcwacgccacagatcaagacaaraccaggcctctgtccaccstggccaacttggccatcatcatcacagatgtccaggacatggaccccatcttcatcaacctgccttacagcaccaacatctacgagcattctcctccgggcacgacggtgcgcatcatcaccgccatagaccaggataaaggacgtccccggggcattggctacaccatcgtttcagggcatctgtgtttacaagaacccaagatctctcaggagctcaggaaaaggggcttgctgtgaggctcagggttcccatggacattctgagctgaccctcctcagcattggatctcctggctcaggaactaggaacgaagcttggatgttttctcctttcctacagcatctgtattcatttcctatagttgccataataaaatgccactaacttagtggcttaaaaaccaaaaaaaaaaaaccctt

SEQ ID NO: 269 - DNA, 916 bp, Homo sapiens
  CDS 90..815
  sig_peptide 90..179: Von Heijne matrix score 13.1999998092651 seq LLLLSTLVIPSAA/AP
  polyA_signal 883..888
  polyA_site 905..916
aaaacagtacgtgggcggccggaatccgggagtccggtgacccgggctgtggtctagcataaaggcggagccagaagaaggggcggggtatgggagaagcctccccacctgcccccgcaaggcggcatctgctggtcctgctgctgctcctctctaccctggtgatcccctccgctgcagctcctatccatgatgctgacgcccaagagagctccttgggtctcacaggcctccagagcctactccaaggcttcagccgacttttcctgaaaggtaacctgcttcggggcatagacagcttattctctgcccccatggacttccggggcctccctgggaactaccacaaagaggagaaccaggagcaccagctggggaacaacaccctctccagccacctccagatcgacaagatgaccgacaacaagacaggagaggtgctgatctccgagaatgtggtggcatccattcaaccavcggaggggancttcgagggtgatttgaaggthcccaggatggaggaraaggaggccctggtacccmtccaraaggccacggacagcttccacacagaactccatccccgggtggccttctggatcattaagctgccacggcggaggtcccaccaggatgccctggagggcggccactggctcancgaraagcgacaccgcctgcaggccatccgggatggactccgcaaggggacccacaaggacrtcctadaaraggggaccgaragctcctcccactccaggctgtccccccgaaarammcacttactgtacatcctcargccctctcggcagctgtargggtggggaccggggarmacctgcctgtagcccccatcaraccctgccccaagcaccatatggaaataaagttctttcttacatccaaaaaaaaaaaa

SEQ ID NO: 270 - DNA, 583 bp, Homo sapiens
  CDS 52..513
  sig_peptide 52..231: Von Heijne matrix score 4 seq LVRRTLLVAALRA/WM
  polyA_signal 553..558
  polyA_site 572..583
aaggaaacagcaaccagagggagatgatcacctgaaccactgctccaaaccatgggcagtaaatgctgtaaaggtggtccagatgaagatgcagtagaaagacagaggcggcagaagttgcttcttgcacaactgcatcacagaaaaagggtgaargcagctgggcagatccaggcctggtggcgtggggtcctggtgcgcaggaccctgctggttgctgccctcagggcctggatgattcagtgctggtggaggacgttggtgcagagacggatccgtcagcggcggcaggccctgttrggggtctacgtcatccaggagcaggcggcggtcaagctccagtcctgcatccgcatgtggcagtgccggcaatgttaccgccaaatgtgcaatgctctctgcttgttccaggtcccaaaaagcagccttgccttccaaactgatggctttttacaggtccaatatgcaatcccttcaaagcagccagagttccacattgaaatcctatcaatctgaaaggcctggggcatggagaacaggctgcactaccctaataaatgtctgaccaggtaaaaaaaaaaaa

SEQ ID NO: 271 - DNA, 697 bp, Homo sapiens
  CDS 172..438
  sig_peptide 172..354: Von Heijne matrix score 4.69999980926514 seq LLPCNLHCSWLHS/SP
  polyA_signal 682..687
  polyA_site 685..697
agattggctgggcagatgggctgactggctgggcagatgggtgggtgagttccctctccccagagccatcggccaggtaccaaagctcagctgtatggattcccaacaggaggacctgcgcttccctgggacccattgttgtactggattaacaagcgacggcgctacggcatgaatgcagccatcaacacgggccctgcccctgctgtcaccaagactgagactgaggtccagaatccagatgttctgtgggatttggacatccccgaagccaggagccatgctgaccaagacagcaaccccaaggcggaagccctgctcccctgcaacctgcactgcagctggctccacagcagccccaggccagatccccattcccacttcccatctktcaggaggtgccctttgccccacccttgtgcaacctaccccccskgctgaaccactctgtctcctatcctttggccacctgtcctgaaaggaatgttctcttccattccctcctgaatctggcccaggaagaccatagcttcaatgycaagccttttccttcaaaactgtagcctcctctcactgaaggtgggagctgcaggaatcaggtgcagagtaggaaatggaactaacctcaggaaggtggtattgacagaggtcaggacccacctggatgtcatgctatgaaacattaaaagaaaaaaaa

SEQ ID NO: 272 - DNA, 803 bp, Homo sapiens
  CDS 148..366
  sig_peptide 148..225: Von Heijne matrix score 5.5 seq LFTLLFLIMLVLK/LD
  polyA_signal 770..775
  polyA_site 792..803
aaatggggggaaaagggcggaaaaggacaaggatccaaactggcgaatttgctgatcttcgcgtccctctccgctttccggccggcagcgctgccagggtatatttccttttttccgatcctgcaacagcctctttaaactgtttaaatgagaatgtccttggctcagagagtactactcacctggcttttcacactactcttcttgatcatgttggtgttgaaactggatgagaaagcaccttggaactggttcctcatattcattccagtctggatatttgatactatccttcttgtcctgctgattgtgaaaatggctgggcggtgtaagtctggctttgacctcgacatggatcacacaatataaaaaaaaaaacctggtacctcattgcactgtkacttaaattasccttctgcctcgcactctgtgctaaactggaacagtttactaccatgaatctatcctatgtcttcattcctttatgggccttgctggctggggctttaacagaactcggatataatgtcttttttgtgaaagactgacttctaagtacatcatctcctttctattgctgttcaacaagttaccattaaagtgttctgaatctgtcaagcttcaagaataccagagaactgagggaaaataccaaatgtagttttatactacttccataaaacaggattggtgaatcacggacttctagtcaacctacagcttaattattcagcatttgagttattgaaatccttattatctctatgtaaataaagtttgttttggacctcaaaaaaaaaaaa

SEQ ID NO: 273 - DNA, 823 bp, Homo sapiens
  CDS 175..336
  sig_peptide 175..276: Von Heijne matrix score 3.70000004768372 seq SVLNVGHLLFSSA/CS
  polyA_site 812..823
aaggcgcgcgcgaccggcggctctttggcgcggattagggggtctcggcgagggagtcatcaagctttggtgtatgtgttggccggttctgaagtcttgaagaagctctgctgaggaagaccaaagcagcactcgttgccaattagggaatggaccgtttgggttcctttagcaatgatccctctgataagccaccttgccgaggctgctcctcctacctcatggagccttatatcaagtgtgctgaatgtgggccacctccttttttcctctgcttgcagtgtttcactcgaggctttgagtacaagaaacatcaaagcgatcatacttatgaaataatggcttcagattttcctgtccttgatcccagctggactgctcaagaaraaatggcccttttagaasctgtgatggactgtggctttggaaattggcaggatgtagccaatcaaatgtgcaccaaraccaaggaggagtgtgagaagcactatatgaagcatttcatcaataacccyctgtttgcatctrscctgctgaacctgaaacaascagrggaagcaaaaactgctgacacagccattccatttcactctacaratgaccctccccgacckacctttgactccttgctttctcgggacatggccgggtacwtgccmgctcgagcagatttcattgaggaatttgacaattatgcagaatgggacttgagagacattgattttgttgaagatgactcggacattttacatgctctgaagatggctgtggtagatatctatcattccaggttaaaggagagacaaagacgaaaaaaaaaaaa

SEQ ID NO: 274 - DNA, 823 bp, Homo sapiens
  CDS 191..553
  sig_peptide 191..304: Von Heijne matrix score 5.69999980926514 seq LAFLSCLAFLVLD/TQ
  polyA_signal 766..771
  polyA_site 804..817
aactctgcagggcctccaaggccaggcttcagggctgggactcagtcctgaggcactggggagccatgaggggctgtggcagggaggggcagggtgtggaaagactcccctggggccatggtggagatgtgctgaggtcttctccctgatcgtcttctcctccctgctgaccgacggctaccagaackagatggagtctccgcagctccactgcattctcaacagcaacagcgtggcctgcagctttgccgtgggagccggcttcctggccttcctcagctgcctggccttcctcgtcctggacacacaggagacccgcattgccggcacccgcttcaagacagccttccagctcctggacttcatcctggctgttctctgggcagttgtctggttcatgggtttctgcttcctggccaaccaatggcagcattcgccgcccaaagarkkcctcctggggagcagcagtgcccaggcagccatcggcsttcaccttcttctccatccttgtctggatattccargcctacctggcakkccaggacctccgaaatgatgctccagtcccttacmarcgcttcctggatgaaggtggcatggtgskkaacaccctccccttgccctctgccaacagcctgtgaacatgcccaccactggccccaacagcctgagttatgctagctctgccctgtccccctgtctgaccgctcmaaagtccccccggcttgctatgatgcctgacaactaaatatccttatccaaatcaataaagagagaatcctccctccagaagggtttctaaaaacaaaaaaaaaaahncctt

SEQ ID NO: 275 - DNA, 1112 bp, Homo sapiens
  CDS 106..603
  sig_peptide 106..216: Von Heijne matrix score 4.30000019073486 seq LWEKLTLLSPGIA/VT
  polyA_site 1102..1112
agcgattgcgaatcctccgctgaggtgatttggatatccctagaacgttgagggcacgagtcgggtcctgagaccaggtcctcagccagcagagccacgttccttatgagcaccgtgggtttatttcattttcctacaccactgacccgaatatgcccggcgccatggggactccggctttgggagaagctgacgttgttatccccaggaatagctgtcactccggtccagatggcaggcaagaaggactaccctgcactgctttccttggatgagaatgaactcgaagagcagtttgtgaaaggacacggtccagggggccaggcaaccaacaaaaccagcaactgcgtggtgctgaarmacatcccctcaggcatcgttgtaaagtgccatcagacaagatcagttgatcagaacagaaagctagctcggaaaatcctacaagagaaagtaratgttttctacaatggtgaaaacagtcctgttcacaaagaaaaacgagaagcggcgaagaaaaaacargaaaggaaaaaaagagcaaaggaaaccctggaaaaaaagaasctmcttaaaraactgtgggagtcaagtaaaaaggtccactgagaaaagaattagagattccaactgacagaatctgccagaagctcccagggaataatggtggcgagttccatcaccagcattattatagtgcttcaaaagaaatatttttgatgaacttaaaagacaacaaatttatttaaatggtgcactaaactgtagtgaacagagacatgcacgattcaagaataaaactcggccgggcacggtggacggtgcctcacatctgtaatcccagcactttgggaggccgaggcgggcggatcacttgaggtcaggagtttgagaccagcctggccaacatggtgaaaccccgtctctactaaaaatacaaaaaattagccaggcatggtggcgggcacctgtaatcccagctactcgggaggccgaggcaggagaattgcgtgaacctgggaggcggaggttgcagtgagctgagatcgcgccactgcactcaagcctgggcaacacctgggtgacagagcaagaccccatcycaaaaaaaaaaa

SEQ ID NO: 276 - DNA, 1623 bp, Homo sapiens
  CDS 47..586
  sig_peptide 47..124: Von Heijne matrix score 6.30000019073486 seq GVGLVTLLGLAVG/SY
  polyA_signal 1583..1588
  polyA_site 1614..1623
agggatctgtcggcttgtcaggtggtggaggaaaaggcgctccgtcatggggatccagacgagccccgtcctgctggcctccctgggggtggggctggtcactctgctcggcctggctgtgggctcctacttggttcggaggtcccgccggcctcaggtcactctcctggaccccaatgaaaagtacctgctacgactgctagacaagacgactgtgagccacaacaccaagaggttccgctttgccctgcccaccgcccaccacactctggggctgcctgtgggcaaacatatctacctctccacmmgaattgatggcagcctggtcatcaggccatacactcctgtcaccagtgatgaggatcaaggctatgtggatcttgtcmtcaaggtctacctgaagggtgtgcaccccaaatttcctgagggagggaaratgtctcaktacctggatascctgaaagttggggatbtggtggaatttcsggggccaagcgggttgctcacttacactggaaaagggcattttaacattcagcccaacaagaatctccaccagaaccccgagtggcgaagaaactgggaatgattgccggcgggacaggaatcaccccaatgctacagctgatccgggccatcctgaaagtccctgaagatccaacccagtgctttctgctttttgccaaccagacagaaaaggatatcatcttgcgggaggacttagaggaactgcaggcccgctatcccaatcgctttaagctctggttcactctggatcatcccccaaaagrttgggcctacagcaagggctttgtgactgccgacwtgatccgggaacacctgcccgctccaggggatgatgtgctggtactgctttgtgggccmcccccaatggtgcagctggcctgccatcccaacttggacaaactgggctactcacaaaagatgcgattcacctactgagcatcctccagcttccctggtgctgttcgctgcagttgttccccatcagtactcaagcactakaagccttagrktcctktcctcagagtttcaggttttttcagttrsatckagagctgaaatctggatagtacctgcaggaacaatattcctgtagccatggaagagggccaaggctcagtcactccttggatggcctcctaaatctccccgtggcaacaggtccaggagaggcccatggagcagtctcttccatggagtaagaaggaagggagcatgtacgcttggtccaagattggctagttccttgatagcatcttactctcaccttctttgtgtctgtgatgaaaggaacagtctgtgcaatgggttttacttaaacttcactgttcaacctatgagcaaatctgtatgtgtgagtataagttgagcatagcatacttccagaggtggtcttatggagatggcaagaaaggaggaaatgatttcttcagatctcaaaggagtctgaaatatcatatttctgtgtgtgtcdctctcagcccctgcccadgctagagggawacagctactgataatcgaaaactgctgtttgtgggcargaacccctggctgtgcaaataatggggctgangccctgtgtgatattgaaaaaaaaaa

SEQ ID NO: 277 - DNA, 526 bp, Homo sapiens
  CDS 99..371
  sig_peptide 99..290: Von Heijne matrix score 3.79999995231628 seq LFIVVCVICVTLN/FP
  polyA_signal 491..496
  polyA_site 513..524
attggattagtagaattgcttttgtcattccattgttttcatatatttgtttgggacattttacttttttctgttaacgcttaccctagraattagaaatgacaccacgtattcttagcgaagtccagttttcagcattttgtccttattggacaatagcaaggatattagaacgtgttggttccgcgtgcttccgtcttgagttatgtgctgctattgtcggatattttgtcttagatgtacgtactttcctgttcattgtggtatgtgtaatttgcgttactttgaattttccacgtttttactttctttgtctctcatcacttaccgcttttgggaccccccccatcggggttcacattccctctccctararcacactcccttggatttcctcradtggggtctgctgcggtgaagctttcccattttatgtgcagattattttcagagggtatatagaattcaggcagctgtttcgttgtagcacattaaaaatattttcccacttcaaaaaaaaaaaacc

SEQ ID NO: 278 - DNA, 989 bp, Homo sapiens
  CDS 44..814
  sig_peptide 44..112: Von Heijne matrix score 8.30000019073486 seq VRLLLXLLLLLIA/LE
  polyA_site 978..989
aaatgtgtacacgcccagcttcctgcctgttactctccacagtatgcgaagaatatccctgacttctagccctgtgcgccttcttttgtdtctgctgttgctactaatagccttggagatcatggttggtggtcactctctttgcttcaacttcactataaaatcattgtccagacctggacagccctggtgtgaagcgcatgtcttcttgaataaaaatcttttccttcagtacaacagtgacaacaacatggtcaaacctctgggcctcctggggaagaaggtatatgccaccagcacttggggagaattgacccaaacgctgggagaagtggggcgagacctcaggatgctcctttgtgacatcaaaccccarataaagaccagtgatccttccactctgcaagtckaratkttttgtcaacgtgaagcagaacggtgcactggtgcatcctggcagttcgccaccaatggagagaaatccctcctctttgacgcaatgaacatgacctggacagtaattaatcatgaagccagtwagatcaaggagacatggaagaaagacaganggctggaaaaktatttcaggaagctctcaaarggagactgcgatcactggctcagggaattcttagggcactgggaagcaatgccaraaccgamagtgtcmccartaaatgcttcarawatccactggtcttcttctartctaccarawaratggatcatcctgggggcattcatcctgttavttttaatgggaattgttctcatctgtgtctggtggcaaaatggcaraaratccacctadargtgataccacggcggcgcaaaattgttcacctgtggtcctcgatcgctgacagccttggctcccactgctgtgtgttccctgagtcaagtggaggcggagcctgcaatgagcggaratcgcgcctctgcattccagtcttggcaacagarcaagactccgtctcaaaaaaaaaaaa

SEQ ID NO: 279 - DNA, 1017 bp, Homo sapiens
  CDS 3..581
  sig_peptide 3..182: Von Heijne matrix score 6.69999980926514 seq LWPFLTWINPALS/IC
  polyA_site 1006..1016
acatgtgccctagtctggaagaggctcccagtgtcaaggggactctgccctgctcaggacaacagcagcctttcccgtttggagcctcaaacatcccactactcctgggcaggagcagaaaggtggctcgaggtgcaccggtcctgtggccatttctcacttggataaaccctgcactgtccatctgtgaccccttaggatcctgcggatggcywtgccacacggcccargtccctgcgcccctgcarttgcctactgcctgtcctcccctcccacatggcacccgggctgtaggccccacgccaggcctcctccctgaggctgcagccccasgcacgtgkggggcactgtcctcacgcagcaggcactggtcatgttccattgtcarctgcctccacctgcacaractcctgtctgtggagaccagaarcttccasaaacatctgttggtgctgctggtggctgtggcccatagtgttctggaaccacctgccctggtcccaaatgtgcagtgtgagatgtgcacacactcagggccccgtgacctggaagccgcagtcgtgtccccagcaccttgggaatgagcctgtcctctgtgtgaaggagggggtggttctcaaaccactgactcttggtgctcaggaggggcctgctgctgtcctgggcatggggtggtcattgttcaagactgaggcagactcagtctttgaaagggtgcagaggccaggcgcggtggctcacgcctgtaattccagcactttgggaggccaaggtggacagatcatgaggtcaggagttcgagaccagcctggccaatacggtgaaaccgcatctctactaarraatawcawaaattagtcgggcatgggtgatgtgtgcttgtagtcccagctactcatgaggyctgaggcagaagaatcacctgaatctgggaggcagaggttgcagtgaaccaagatcgcacgactgtacaccagcctgggcgacagagtgagactccgtctcaaaaaaaaaaam

SEQ ID NO: 280 - DNA, 529 bp, Homo sapiens
  CDS 107..427
  sig_peptide 107..190: Von Heijne matrix score 3.79999995231628 seq RFLSLSAADGSDG/SH
  polyA_signal 499..504
  polyA_site 516..529
aaagtcagcgctggagtcggctaggcggctggaaacggcggctgccgccggtgactcagggaggcgggaggccgmsggmggagctcttcctgcaggcgtggaraccatggtgctcacgctcggagaaagttggccggtattggtggggaggaggtttctcagtctgtccgcagccgacggcagcgatggcagccacgacagctgggacgtggagcgcgtcgccgagtggccctggctctccgggaccattcgagctgtttcccacaccgacgttaccaagaaggatctgaaggtgtgtgtggaatttgakggggaatcttggaggaaaagaagatggatagaagtctacagccttctaaggaaagcatttttagtaaaacataatttggttttagctgaacgaaagtcacctgaaatttcttggggttaaccatctttagttaaatggaattttaatttaaatgacgctttgctaattttaagtgttaagcattttgcattaaaatattcatataataaaaaaaaaaaa

SEQ ID NO: 281 - DNA, 1046 bp, Homo sapiens
  CDS 45..407
  sig_peptide 45..83: Von Heijne matrix score 5.69999980926514 seq MLVLRSALTRALA/SR
  polyA_signal 1008..1013
  polyA_site 1032..1042
aaaaggacacggctggctgcttttctcagcgccgaagccgcgccatgctcgtcctcagaagcgccctgactcgggcgctggcctcacggacgctggcgcctcagatgtgctcatcttttgctacgggacccagacaatacgatggaatattctatgaatttcgttcttattaccttaagccctcaaagatgaatgagttcctggaaaattttgagaaaaacgctcaacttcggacagctcactctgaattggttggatactggagtgtakaatttggaggcagaatgawtacagtgtttcatatttggaagtatgataattttgctcatcgaactgaatttcagaaagccttggccaaagataaggaatggcaagaacaattcctcattccaaatttggctctcaattgataaacaagatagtgagattacttatctggtaccatggtgcaaattagaaaaacctccaaaagaaggagtctatgaactggccacttttcagatgaaacctggtgggccagctctgtggggtgatgcatttaaaagggcagttcatgctcatgtcaatctaggctacacaaaactagttggagtgttccacacagagtacggagcactcaacagagttcatgttctttggtggaatgagagtgcagatagtcgtgcagctgggagacataagtcccatgaggatcccagagttgtggcagctgttcgggaaagtgtcaactacctagtatctcagcagaatatgcttctgattcctacatcgttttcaccactgaaatagttttctactgaaatacaaaacatttcattaactgctataggatctgtctgctaatggtgcttaaattctcccaagaggttctcacttttatttgaaggaggtggtaagttaatttgctatgtttcttgcattatgaaggctacatctgtgctttgtaagtaccacttcaaaaaatakttctgtttactttctgcatggtatttcagtgtctgtcatacattaaaaatacttgtcactgtttyaaaaaaaaaaammcc

SEQ ID NO: 282 - DNA, 880 bp, Homo sapiens
  CDS 201..332
  sig_peptide 201..251: Von Heijne matrix score 7.80000019073486 seq VLWLISFFTFTDG/HG
  polyA_site 869..880
aattgctgatggatcagtgagcctgtgttcatgccagtgagctgctgtggctcagatactgatactttctttccaaacagcataagaagtgattganccacaagtatactgaaggmarggyhcccwsvartyctggwgtgamgagataaatcaccagtcacagactatgcacccgactgctgctgttcagtccagggaaaatgaaagttggagtgctgtggctcatttctttcttcaccttcactgacggccacggtggcttcctgggggtgagttggtgctatgtctcatatctcttctcaactaactctcctctctcgttccggcgcatttagaacccctcactctctaggggactgcaactgcataatttaatgtacttgagatcagaagtcctgagttctcgtttcaacattaccaacattcactgtgtggccttggataagtragtcatttcatctcttcggagcttagatgatcmaactgcaaraggaggatctttgattamactatcttagagatcttttccagttcaacacatgctgtactatggcttctcggatgcagaaaaatcacatggatggacattagcaatccttaracactgtctttcctgtctacactcgcttgagtgatgckttcatctaggatcatggttttaatattctctacatgctgatgactcccagctgtatagctccatctcagaacctctcccctgtccacactcacatatccattacctacgtgttatttccagctgggaaatccagcggaacctcggnaacttcatttgnttcaaaatcgnaacccaatccttcttgcctatctcagcaagtggtatcactatctttccagctacttaggcaaaaaaaaaaaa

SEQ ID NO: 283 - DNA, 1217 bp, Homo sapiens
  CDS 217..543
  sig_peptide 217..255: Von Heijne matrix score 6.40000009536743 seq MCLLTALVTQVIS/LR
  polyA_site 1206..1217
aatgccagtgtcagcttctctccgaaaactgggtaatacgaaatggtctttattggttgtgaacactcgagctgagaaacattttaggatctttgtgtcttttgtgatgattttgtttctgraagrwggaaasctgtctaaaaatattcaagtgtgcaaccaaggatttagatgaagccagcaaacaaaggaatcatgtaatcaggacctgagcgaatgtgcttactcacggcgttagttacacaggtgatttccttaagaaaaaatgcagagagaacttgtttatgcaagaggagatggccctggngcccctcgccccggatctactgctcatccaccccatgcgattccaaattccccaccgtctactccagtgccccattccatgcccccctccccgtccagaattccttatgggggcacccgctccatggttgttcctggcaatgccaccatccccagggacaraatctccagcctgccagtctccadacccatctctccaagcccaagcgccattttaraaaraarrratgtcaagcctgatgaaracatgagtggcaaaaacattgcaatgtacaraaatgagggtttctatgctgatccttacctttatcacgagggacggatgagcatascctcatcccatggtggacacccactggatgtccccgaccacatcattgcatatcaccgcaccgccatccggtcagcgagtgcttattgtaacccctcaatgcaagcggaaatgcatatggaacaatcactgtacagacagaaatcaaggaaatatccggatagccatttgcctacactgggctccaaaacaccccctgcctctcctcacagaktcagtgacctgaggatgatagacatgcacgctcactataatgcccacggcccccctcacaccatgcagccagaccgggcctctccgagccgccaggcctttaaaaaggagccaggcaccttggtgtatatagaaaagccacggagcgctgcaggattatccagccttgtagacctcggccctcctctaatggagaagcaagtttttgcctacagcacggcgacaatacccaaagacagagagaccagagagaggatgcaagccatggagaaacagattgccagtttaactggccttgttcagtctgcgctttttaaagggcccattacaagttatagcaaaratgcgtctagctaaaaaaaaaaaa

SEQ ID NO: 284 - DNA, 959 bp, Homo sapiens
  CDS 18..446
  sig_peptide 18..140: Von Heijne matrix score 4.09999990463257 seq GILILWIIRLLFS/KT
  polyA_signal 930..935
  polyA_site 948..959
aaaggaagcggctaactatggcgaccgccacggagcagtgggttctggtggagatggtacaggcgctttacgaggctcctgcttaccatcttattttggaagggattctgatcctctggataatcagacttcttttctctaagacttacaaattacaagaacgatctgatcttacagtcaaggaaaaagaagaactgattgaagagtggcaaccagaacctcttgttcctcctgtcccaaaagaccatcctgctctcaactacaacatcgtttcaggccctccaagccacaaaactgtggtgaatggaaaagaatgtataaacttcgcctcatttaattttcttggattgttggataaccctagggttaaggcagcagctttagcatctctaaagaagtatggcgtggggacttgtggaccctgtggattttatggcacatttgaatgaaratgaaggatcattgatttccttgtgtatggataatccgggaacaggccaactaaatatttgatgaatgtatgatttcaaatacagtgaattccctgggagtcatcaaaraagacggcattttatggttgtttttattaagtgtatattctttgctcctgaaaatgttattaaataattgtttaggccgggcatggtggctcatgcctgtaatcccagcactttcaaaggctgaggcaggcagatcacctgaggtcaggagttcaaaaccagcctggccaacatgctgaaacctcgtctctactaaaaatacaaaaattagctgggcgtggtggtggrtgcctgtggtcccagctrcgtgggaggctgaggtgggagaattgcttcaacctgggaggcggaggttgcagtgagccgagatcatgccactgcactccagcctgggcaacagagcaagactgtctcaaaaataaataaataaataaaattgtttaaatgaaaaaaaaaaaa

SEQ ID NO: 285 - DNA, 921 bp, Homo sapiens
  CDS 29..724
  sig_peptide 29..118: Von Heijne matrix score 3.90000009536743 seq VAHALSLPAESYG/NX
  polyA_signal 886..891
  polyA_site 910..920
aaggagccacgctttcgggggttgcaagatggcggccaccagtggaactgatgagccggtttccggggagttggtgtctgtggcacatgcgctttctctcccagcagagtcgtatggyaacgrtyctgacattgagatggcttgggccatgagagcaatgcagcatgctgaagtctattacaagctgatttcatcagttgacccacagttcctgaaactcaccaaagtagatgaccaaatttactctgagttccggaaaaattttgagacccttaggatagatgtgttggrcccagaaganctcaagtcagaatcagcnaaagagcccccaggatacaattctttgccattgaaattgctcggaaccgggaaggctataacaaagctgtttatatcagtgttcaggacaaagaaggagagaaaggagtcaacaatggaggagaaaaaagagctgacagtggagaagaagagaacaccaagaatggaggagagaaaggagctgatagtggagaagaaaaagaggaaggaatcaacagagaagacaaaactgacaaaggaggagaaaaagggaaagaagctgacaaagaaatcaacaaaagtggtgaaaaagctatgtaaggtatacagggaacagcactctagaagctatgactcaattgagactacaagtaccacggtgctacttgcacagacccctttggttaaatgtaaattcttgtacaattgaaggatacgcagaaggacatctttctagtctaacagtcaggagctgctctggtcattcccttgtatgaactggtctaaagactgttagtggggtgttagttgatttttcctggtatactgtttcttggctgacactactggtcaagtaagaaatttgtaaataaatttcttttggttcttattaamaaaaaaaas

SEQ ID NO: 286 - DNA, 1344 bp, Homo sapiens
  CDS 404..586
  sig_peptide 404..466: Von Heijne matrix score 4.09999990463257 seq SLMFFSMMATCTS/NV
  polyA_signal 1304..1309
  polyA_site 1334..1344
ataatttaatgcaaaatatccttttatgaatttcatgttaatattgtgaaatattaaaataattccacaatagttgagaaaaatgagcatttttttccatttttaaaaaatgcatagaaaagacaattttaaaatcctgggamccawatttatttagaagtagctgttagtaaaacattagaaaaggagtcaggccatbaggttatttatnbnaatctctaagcaattaggntgaagttattaagtcaagcctagaaaagctgcctccttgtaaggctttcatgacaatgtatagtaatcbrcagtgtccaattcttcgcactcctcaggaatatcactacctcaggttacggtacacaggctataattgatgatgatgttcagataactgaagacacaataaatgacattcagacatcaggacaattccctcatgttcttttctatgatggccacctgtaccagcaacgtgggtttcacccacacaacgatgaactgttctcttacttctccagttgattttaaagacttgttaagagtcttactaataaaatttgggtatgatagaaaatccacaatcaaatcttgaaccaaataacatattaaattactaatatttaagtgatggaagacacacaaaaaacttaaaagcacgaacaacctaacttgaaaaaraattttaaaatatgattaacctgaaraaaararaatcctaaragccaaagctcctttttatttagcttggaattttcctattggttcctaacaaactgtcccaatgtcatataaggaaacatgatctattacattcctttataacaacgtggararactataaacctatgtaagtagtaaaactatatcagadactcaggaractgactwwaaggcctggatctgcagtgtattatctgtataaaaattggcagggggaagctaaaaggaaaggagattggagatctcaattctatcatggtgtatttcatacgcaaatcaragcatgcattgttttttgtttttggaaaravaarggaagtgtgttctgccccatgtttccttccgtgtttatagttcaaactctatatatacttcaggtattttttgtttagcccttcattataaatgggcaggaaattgtttatcaacctagccagtttattactagtgaccttgacttcagtatcttgagcattcttttatatttttcttttattatcctgagtctgtaactaaacaattttgtcttcaaatttttatccaatatccattgcaccacaccaaatcaagcttcttgattttcaaaaataaaaagggggaaatacttacaacttgtaaaaaaaaaaa

SEQ ID NO: 287 - DNA, 585 bp, Homo sapiens
  CDS 331..432
  sig_peptide 331..387: Von Heijne matrix score 7 seq AGLSSCLLPLCWL/ER
  polyA_signal 548..553
  polyA_site 573..585
aagcctaggtgtggcgccccgaccggactttcacttctggccagccctttccccacctgggcgcgggassggtgccagtctttaaacaacctctcgatgggtcccacgaagatgtttccagacccttggaatgccaagttcaagtttagctatgtctcgcggagaggccggtggaagaagcaacgagaatgaagcaccccagttctctgctgagcacatgggcatctgcaataaagatttaatttcccagcttctcctgaagctcggtatggccacaacactaaattctgcccgaggagattgagcaaaatagtatgggacttccaagaaatgtttttaaagtcaggggcaggcctttcttcatgccttcttcctctttgctggctggaacgcaaagaccatggcaggaggccaagcasccatcctggaaggtgaaagcctcatactaaggacgtcaracagcgaaataararcctgggtccttgaccctgtaaasatctccctccccatcctggtctgtctgccttgactcctttcatatgaaaaaaataaacttttaacttgcgtwaaccaaaaaaaaaaaaa

SEQ ID NO: 288 - DNA, 914 bp, Homo sapiens
  CDS 59..703
  sig_peptide 59..220: Von Heijne matrix score 5.09999990463257 seq FLLSQMSQHQVHA/VQ
  polyA_signal 886..891
  polyA_site 903..914
acaaatatcaatgatgtttatgaatctagtgtgaaagtkttaatcacatcacaaggctatgaacrratatgcaagtccattcaactgwcaattgardtatttggakttgagcagrttcgagtgtgtrcatagagatggaagagtaattacactgtcttatcaggagcaggagctacaggattttcttctgtctcagatgtcacagcaccaggtacatgcagttcagcaactcgccaaggttatgggctggcaagtactgagcttcagtaatcatgtgggacttggacctatagagagcabtggtaatgcatctgccatcacggtggccccccaagtggtgactatgctatttcagttcgtaatggacctgaaagtggcagcaagattatggttcagtttcctcgtaaccaatgtaaaraccttccaaaaagtgatgttttacaarataacaaatggagtcatcttcgtgggccattcaaaraagttcagtggaataaaatggaaggtckaaattttgtttataaaatggarmtgcttatgtctgcacttagcccttgtctactatgattttttccaratgtttcctaaaraagtttccaraaactttgacttgaaatgtttgcaratcaactataagcacaaagaagarataacttccaaaagagtgctgtttttaaaaataataattaggaaatgttttatttagcactttcaaacttttcactttataaatgacaagtgctttgaaatgcagaagtttatgtacagttgtatatacagtatgacaagatgtaaaataatatgtttttcatgcagtttaaaatattactaacttaagggtttctatgtgctttttaaaatattccttctttgatgttgacatcaaataaagtatgtggtttaaaaaaaaaaaa

SEQ ID NO: 289 - DNA, 1161 bp, Homo sapiens
  CDS 672..752
  sig_peptide 672..722: Von Heijne matrix score 4.30000019073486 seq LLYAHLSFTSKRA/VV
  polyA_site 1150..1161
aagatatcactgtcttgttttcacttagatcctacttacaaagtgagggttattaacagaataaagccttcctttaaagctttataataatcatatttattaataatgctgttgtgcatacttatagtatgcatatattcagcatatgttgcatgtsttcagaattacataagatgaaatccctttcattgcaacttgcaagtgagaaaagatccttagtggctctggtggaagaaatagtatttcttcttctcagggtgtctccctgccttggcccctcccagaagccccggctttaaaagtgaaaatgtttgaaacatgaaacatgtctgtaggaagcatcagcatggccataagtgcartgattttcatatatgcctctgcccatttcaaatatatttttgacatgaataaatctaacagtatacaraataattcatgtaaraccctaacgtgtacatgtgaaaaagcatttctatataatgtgaggagcactggccatcaattagggaaataaaggtcatgtaatattgcaaattttcaaaatagagcsstgcaagataactgcaatcataccaaaaactatttgagtaaatggatttttaaagtaatttttgtttaaaaaaatttatatttcagaagsagaaaatgtcaaatgatagtctttgtaaatggtggtgcaccttctctatgcacatctgtcttttacatcaaaaagagctgtggtcatgctaaaattagagataactttttgaatgacttggtcaagctgtgtgtaaaatatttaaccataagtcaagtacagtgtactatgtttaataaagttacatttaatgcatttattgcatatatgaatatatacatgaagaggctttatgtcttctggtatttgattttgaatgttttttaagtcagtggtgcctttaggcaagaactttcgaaattaatcattctttgtgttttctgatttttcaggtaacatgtacactatttagaaaccatcatagtttattcaccttaaaaaattgattgtattatttaaatatatcacttagatgggcatttcctataattaggatattccaaatagttgctgaaatcaattgtgccattgaccaatggatgcacttggttagccttaattttttyaaaaaaaaaaaa

SEQ ID NO: 290 - DNA, 363 bp, Homo sapiens
  CDS 57..311
  sig_peptide 57..128: Von Heijne matrix score 5.30000019073486 seq LFHLLFLPHYIET/FK
  polyA_signal 332..337
  polyA_site 351..363
acatttcttactgccttacgctcatcctgaggtccaccttggtctctaaaaacaccatgtgttctcatgcctccatgtcttttcacacactgttccatttgctcttcctcccacattacattgaaactttcaagcctcagtcgaaacattgcttcttctggatagcagccttcttgacatccctcctcactccccagtccctacagggcttccatagctctttatgtgcacttcgatcccagcattttccatcgacttgtaattgtttctgctacctgacaatcatcgccttgdrdtactgggacaacctttgattactcattatatcctcaataaatatttgttgaaccaaaaaaaaaaaaa

SEQ ID NO: 291 - DNA, 645 bp, Homo sapiens
  CDS 80..232
  sig_peptide 80..127: Von Heijne matrix score 3.70000004768372 seq IALTLIPSMLSRA/AG
  polyA_signal 617..622
  polyA_site 634..645
accttcttgttatttatgctattctctttgtggctccattcttctttcaatcttctcagcttataaccgtctttcccttatgctaaggatagcccttacactcatcccatctatgctgtcaagggctgctggttggtgctggtacaaggagcccactcagcagttttcttacctttgcctgccctgcctttcatggaataaraaaggcaacgttttgcagcttccaaatttctgaaraaactaatctcarattggcagttaaagtcaaaatgttgccaaatatttattccttttgcctaaktttggctacccggttcaattgctttttatttttaatgtcttgactcttcaragttcgtacctcaaaaraacaatgaraacatttgctttgctttctgctgaatccctaatctcaacaatctatacctggactgtccagttctcctcctgtgctatcttctcttctatccaagtaraatgtaygccaggarctccttccctctarcaatttctactaaaatgtccaagtaraatgtttccttttacaatcaaattactgtatttattaatttgctaraatccaktaaatcattttggtagctctggctgtgctatcaataaaaagatgaaagcaaaaaaaaaaaa

SEQ ID NO: 292 - DNA, 400 bp, Homo sapiens
  CDS 91..291
  sig_peptide 91..219: Von Heijne matrix score 3.79999995231628 seq LISVLYLIPKTLT/TN
  polyA_signal 367..372
  polyA_site 389..400
aacaaaaggagagttttataattcactttaaaaggagatttgatggtaaagtttaaagattaaaatattttgttcttcaattacagagcgatgaccccacagtatctgcctcacggtggaaaataccaagttcttggagattactctttggcagtggtcttccccctgcacttttctgatctaatttctgttttataccttatacccaaaacacttactaccaacacagctgttaaacattctatacaaaaaaattgtatgmatctggtattaggaaaattactttcacagtaaatatcaaagaaaaaagattaagggtctctttgccatgcttttcatcatatgcaccaaatgtaaattttgtacaataaaattttatttcctaagyaaaaaaaaaaaa

SEQ ID NO: 293 - DNA, 496 bp, Homo sapiens
  CDS 196..384
  sig_peptide 196..240: Von Heijne matrix score 6.69999980926514 seq ILSTVTALTFARA/LD
  polyA_signal 461..466
  polyA_site 485..496
aaaaaattggtcccagttttcaccctgccgcagggctggctggggagggcagcggtttagattagccgtggcctaggccgtttaacggggtgacacgagchtgcagggccgagtccaaggcccggagataggaccaaccgtcaggaatgcgaggaatgtttttcttcggactctatcgaggcacacagacagaccatggggattctgtctacagtgacagccttaacatttgccagagccctggacggctgcagaaatggcattgcccaccctgcaagtgagaagcacagactcgagaaatgtagggaactcgagagcagccactcggccccaggatcaacccagcaccgaagaaaaacaaccagaagaaattattcttcagcctgaaatgaakccgggatcaaatggttgctgatcaragcccatatttaaattggaaaagtcaaattgascattattaaataaagcttgtttaatatgtctcaaacaaaaaaaa

SEQ ID NO: 294 - DNA, 968 bp, Homo sapiens
  CDS 54..590
  sig_peptide 54..227: Von Heijne matrix score 3.5 seq GGILMGSFQGTIA/GQ
  polyA_site 955..965
atatttgccccttactttatcttgtgccttgagaaattgctggggagagaggtatgtccactgggcagctgtacaggatggaggatatagggcgtttccactcccagcagccaggttccctcaccccaagctcacccactgttggggagattatctacaataacaccagaaacacattggggtggattgggggtatccttatgggttcttttcagggaaccattgctggacaaggcacaggagccacctccatttctgagctctgcaagggacaagaactagagccatcaggggctgggctcactgtggccccaccccaagccgtcagcctccagggwatctacaccctgccttggctgctacagctttttcactccactgccctargggnadttcagcaacctaatggatctctatctctgaacatctcttcatcccatgctccrrgtccarcaacctgcaccctggaaccaggagtggaccctacccgasctgtctgtattaatccccatcccccaccaccaatcttaaaaabccctctgtccccctaccctaaaccccagttaggtacccatgctgggcaagtcaattaacaatttatgcacaggtactagttttattgtattaccgttccagggtagctttgaaaaaagtatctcaaaaaggcaacatgggccgagcgcagtggctcacgcctgtaatcccagcactttgggaggccaaggtgggcagatcgcctgaggtctggagttcaagaccagcctggccaacagggtgaaaccccgtctctacaaaaatargaaaattrgccaggtgtggtggcagacgtctgtrgtcccagctattcaggagactgaggcacgagaattccatgaacccaggatgcggaggttgcagtgagccgagattgtgccactgcgctccagcctgggcgacagagtggtattctgtttcaaaaaaaaaaamcm

SEQ ID NO: 295 - DNA, 901 bp, Homo sapiens
  CDS 133..846
  sig_peptide 133..345: Von Heijne matrix score 9.39999961853027 seq VVSFLLLLAGLIA/TY
  polyA_site 890..901
aagcagcttccaggatcctgagatccggagcagccggggtcggagcggctcctcaagagttactgatctatnnatggcagagaaaaaaaaattgtgaccagagacgtgtagcaatgaacaaggaacrtcataatgrwnnnkttcacagacccctcttcagtgaatgaaaagaagaggagggagcgggaagaaaggcagaatattgtcctgtggagacagccgctcattaccttgcagtatttttctctggaaatccttgtaatcttgaaggaatggacctcaaaattatggcatcgtcaaagcattgtggtgtcttttttactgctgcttgctgggcttatagctacgtattatgttgaaggagtgcatcaacagtatgtgcaacgtatagagaaacagtttcttttgtatgcctactggataggcttaggaattttgtcttctgttgggcttggaacagggctgcacacctttctgctttatctgggtccacatatagcctcagttacattagctgcttatgaatgcaattcagttaattttcccgaaccaccctatcctgatcagattatttgtccagatgaagagggcactgaaggaaccatttctttgtggagtatcatctcaaaagttaggattgaagcctgcatgtggggtatcggtacagcaatcggagagctgcctccatatttcatggccagagcagctcgcctctcaggtgctgaaccagatgatgaagagtatcaggaatttgaagagatgctggaacatgcagagtctgcacaagtaagaacagtggggatagaaaatagaacactttacttcttcctaaagaggctattaaggtaaaattgttagtagttactctgaagaagaaaactgctaaagtaaaaaaaaaaaa

SEQ ID NO: 296 - DNA, 1347 bp, Homo sapiens
  CDS 138..671
  sig_peptide 138..248: Von Heijne matrix score 3.5 seq LVFNFLLILTILT/IW
  polyA_signal 1319..1324
  polyA_site 1338..1347
aagaatgcttgtgaagtagcaactaaagtggcagtgtttcttctgaaattctcaggcagtcagactgtcttaggcaaatcttgataaaatagcccttatccaggtttttatctaaggaatcccaagaagactggggaatggagagacagtcaagggttatgtcagaaaaggatgagtatcagtttcaacatcagggagcggtggagctgcttgtcttcaattttttgctcatccttaccattttgacaatctggttatttaaaaatcatcgattccgcttcttgcatgaaactggaggagcaatggtgtatggccttayaatgggactaattttacsatatgctacagcaccaactgatattgaaagtggrrctgtctatgactgtgtaaaactaactttcagtccatcaactctgctggttaatatcactgaccaagtttatgartataaatacaaragagaaataagtcagcacamcatcaatcctcatcamggaaatgctatacttgaaaagatgacatttgatccaraaatcttcttcaatgttttactgccaccaattatatttcatgcaggatatagtctaaagaagagacacttttttcaaaacttaggatctattttaacgtatgccttcttgggaactgccatctcctgcatcgtcatagggtaagtgacattcggagctcaagttgcaggtggctgtggggtcygtgatctgtgtgagggatctaacacttccaggattcttgctggckgggaaaattgtcttttttttartawatcacawatttgtatgttttttcwgacttaattccacggcttckgamaaatacaaggcttcaaatcaaagcaaactawaggattgctggactttctctgtgagttctggacttctgacttagggaatgtggatcacttgccttgagttatgtgaagcgcattgcattcttcttttagtttgagtaatsccgatatgctcactgcattcttttttgtcttgtattgagagaccttacctgtatttggcaggagtgcaaaagtaactatatgccaagagttttctttctaaaggaaagtttacaagacagcagtctgaaacagatatgtccaaatatcaacagagttgcttaatacagggatagcttttcagttaataccctgtagaatgcagactctttttttcattgtattttcttgattatgctactgagccctaagtcacacgttatatactctggcttgcagctcatcataaagtaaaatgtggtaccaaatggtgaaggcaatccagcctctgataatcccgtccaatacattaaagctccactgcaggaaaaaaaaaa

SEQ ID NO: 297 - DNA, 987 bp, Homo sapiens
  CDS 124..411
  sig_peptide 124..186: Von Heijne matrix score 6.30000019073486 seq MVALCCCLWKISG/CE
  polyA_signal 948..953
  polyA_site 971..983
aagacgctgcctttagggagagataaaaagcataatgacattagctaggaaagttaattttcagttcttactgaagtgctgtatgaaactgaaatttccaaggaactgaattttgtgagccaaatgagcatgcaattcttgtttaagatggtggccttatgctgttgtctctggaagatctccggctgtgaggaagtccctctaacttacaacctgctcaagtgcctcctagataaagcgcactgtgtactcctgacaccttgtggttacatcttttccttgatcagtccagaaattctcaaactcactttaatcactttgcavatcctcttaatactcaaaaatctacacttactgtggctgacagtttcaagcawatgtgttcatcgcagtagtgcaagaaaagaaaagtagaagaaccctgcagagatttgatggaacccagcttctattcattaaaaccaatggcaaaatataaagcaaataggaggtgacgaaggttacaaaaatacgtattgtttatgttttccctggggtgtgctgattgtcaggcatcagttccctgtgccattcattccccaacacagcatgcatcagaaattttatcaataaatgctttctctctcaatgttcaacctatgctgatagaccattaaatacagtttttgggttcacagcttgtcatcatcatttgtctatacctgtggcaaagaatatctaataagatactctcagcattttgcacacttaaactaagatgctgaatgctgtattttacggaataatcagccacattaaatttggagactcaacaagcatgctgtgaacattcaacattaggtttaaattttatttttaaaagttaataataaaaggatatatgttaagtattatgaaaccctgcatatactgtaataaaatggtggatgtgaatggacaatatatgcaataaaatttataatttgattcyaaaaaaaaaaaaamccv

SEQ ID NO: 298 - DNA, 748 bp, Homo sapiens
  CDS 372..494
  sig_peptide 372..443: Von Heijne matrix score 5.30000019073486 seq RILLLHFYCLLRS/SE
  polyA_signal 708..713
  polyA_site 732..745
acatgaaatgtgcttggtctgtgatctcttggtcagatatctgccttccaggcgatcctttgaggttgtgtaattcagctggccctggctcctggtccctgttactgagctgggcagtcgaaccgaaggcagatgagctcaagatcatgccttgggaagcatggtgctctaggggtgcctttttattcctttcattgtattatagactgtttccaagtttatggttagaaatggtaaagtgggtctggtgttttgaggtagaacccagcctagggcaagatatgaactgttcttgaggtagaaatgtctacagtcagttgtttcatctagcttgcatcttaaaacacaaacccttcagttgctttcacttaatgcacacatttgccaatgacagagggttatacaggatccttcttttacatttctattgtctgctacgctcatcagagtatattttggggtacaaggttttgggggtttttttycccattttgtaactgccttattgaaaadtaaktgcccttccattccaggcctcctcatattgtacttgtttcctgccaaatctgggggatcatttgtattttaactttgtaatctatggctctgtactgttgaaagstctcaattctgtggggtctccttagtatgtatgtgacttttcatgttgcaatatcacacgatgggatggcccgacttttgctcttaataaataatctgaatgagtaagaraaaaaaaaaaaaaccc

SEQ ID NO: 299 - DNA, 1106 bp, Homo sapiens
  CDS 112..450
  sig_peptide 112..192: Von Heijne matrix score 7.19999980926514 seq SLLFFLLLEGGXT/EQ
  polyA_signal 1053..1058
  polyA_site 1095..1106
aagacctcggaacgagagcgccccggggagctcggagcgcgtgcacgcgtggcavacggagaaggcvakkrcnnnnrcttgaaggttctgtcaccttttgcagtggtccaaatgagaraaaagtggaaaatgggaggcatgaaatacatcttttcgttgttgttctttcttttgctagaaggaggckaaacagagcaagtramncattcagagacatattgcatgtttcaagacaagaagtacagagtgggtgagagatggcatccttacctggaaccttatgggttggtttactgcgtgaactgcatctgctcagagaatgggaatgtgctttgcagccgagtcagatgtccaaatgttcattgcctttctcctgtgcatattcctcatctgtgctgccctcgctgcccagaagactccttacccccagtgaacaatrwggtgaccagctagtcttgckagtacaatgggacaacttaccaacatggasagctgttcgtagctgrrgggctctttcagaatcggcaacccmatcaatgcacccagtgcagctgttcggarggaaacktgtattgtggtctcaagacttgccccaaattaacctgtgccttcccagtctctgttccarattcctgctgccgggtwtgcagargagatggacaactgtcatgggaacmttctgatggtgatatcttccggcaacctgccaacagagaagcaagacattcttaccaccgctctcactatgatcctccaccaagccgacaggctggaggtctgtcccgctttcctggggccagaagtcaccggggagctcttatggattcccagcaagcatcaggaaccattgtgcaaattgtcatcaataacaaacacaagcatggacaagtgtgtgtttccaatggaaagacctattctcatggcgagtcctggcacccaaacctccgggcatttggcattgtggagtgtgtgctatgtacttgtaatgtcaccaagcaagagtgtaagaaaatccactgccccaatcgatacccctgcaagtatcctcaaaaaatagacggaaaatgctgcaaggtgtgtccaggtaaaaaagcaaaaaaaaaaaa

SEQ ID NO: 300 - DNA, 1191 bp, Homo sapiens
  CDS 117..866
  sig_peptide 117..170: Von Heijne matrix score 10.6999998092651 seq LILLALATGLVGG/ET
  polyA_signal 1159..1164
  polyA_site 1178..1190
aaaacccagcctacctgctgtagctgccgccactgccgtctccgccgccactggwcccccagagcbnmagccccagagcctaggaacctggggcccgctcctcccccctccaggccatgaggattctgcagttaatcctgcttgctctggcaacagggcttgtagggggagagaccaggatcatcaaggggttcgagtgcaagcctcactcccagccctggcaggcagccctgttcgagaagacgcggctactctgtggggcgacgctcatcgcccccagatggctcctgacagcagcccactgcctcaagccccgctacatakttcacctggggcagcacaacctccagaaggaggagggctgtgagcaracccggacagccactgagtccttcccccaccccggcttcaacaacagcctccccaacaaagaccammgcaatgacatcatgctggtgaakatggmatcgccagtctccatcacctgggctgtgcgacccctcaccctctcctcacgctgtgtcactgctggcaccagctgcctcatttccggctggggcagcacgtccagcccccagttacgcctgcctcacaccttgcgatgcgccaacatcaccatcattgagcaccagaagtgtgagaacgcctaccccggcaacatcacagacaccatggtgtgtgccagcgtgcaggaagggggcaaggactcctgccagggtgactccgggggccctctggtctgtaaccagtctcttcaaggcattatctcctggggccaggatccgtgtgcgatcacccgaaagcctggtgtctacacgaaagtctgcaaatatgtggactggatccaggagacgatgaagaacaattagactggacccacccaccacagcccatcaccctccatttccacttggtgtttggttcctgttcactctgttaataagaaaccctaagccaagaccctctacgaacattctttgggcctcctggactacaggagatgctgtcacttaataatcaacctggggttcgaaatcagtgagacctggattcaaattctgccttgaaatattgtgactctgggaatgacaacacctggtttgttctctgttgtatccccagccccaaakwcagctcctggccatatatcaaggtttcaataaatatttgctaaatgaawaaaaaaaaaac

SEQ ID NO: 301 - DNA, 1070 bp, Homo sapiens
  CDS 13..465
  sig_peptide 13..75: Von Heijne matrix score 3.90000009536743 seq PVAVTAAVAPVLS/IN
  polyA_signal 1035..1040
  polyA_site 1060..1070
agagtcgggaaaatggctgcgagtacctccatggtcccggtggctgtgacggcggcagtggcgcctgtcctgtccataaacagcgatttctcagatttgcgggaaattaaaaagcaactgctgcttattgcgggccttacccgggagcggggcctactacacagtagcaaatggtcggcggagttggctttctctctccctgcattgcctctggccgagctgcaaccgcctccgcctattacagaggaagatgcccaggatatggatgcctataccctggccaaggcctactttgacgttaaagagtatgatcgggcagcacatttcctgcatggctgcaatgcaagaaaagcctattttctgtatatgtattccagatatctggtgagggccattttaaaatgtcattctgcctttagtgaaacatccatatttagaaccaatggaaaagttaaatcttttaaatagcttagcagtgggccactgaatgaatgtactttatacatagcaataataaaaaaaagatatcataaataaagttaaaaaggatggtaaaaaaaaaaatattcttaggaatgactaacaggataagtaacaacctgattatttatttactttaggttatataaggttcttcatgcctgtgaattaatattattgtgtaagaattaagttaaaaagcctgggctgacttttaaatttataaattcatttatcatgtttatagtatatttattgtttttctttcatggctattaaaaagtatgactgtaaaggacaatgcaagtaaaccaacttaatactgtattgaataataagtacaatttattattttactttgaaacattatgaatttactttcctactttttcttagttgttatctatataaattgattaaaaaaacattttatgtacttctcatttcctagtacaggttgagtatcccttatttgaagtgcttgggaccaaaagtgtttcagatttcagatttttttcagattttggtatatttgcattatacttactggttgaaataaaaaatgctgcagtgagtgtcaaaaaaaaaaa

SEQ ID NO: 302 - DNA, 1213 bp, Homo sapiens
  CDS 2..718
  sig_peptide 2..76: Von Heijne matrix score 3.90000009536743 seq RVGLLLGGGGVYG/SR
  polyA_signal 1170..1175
  polyA_site 1203..1213
aatgccccggaagcggaagtgcgatcttcgggctgtcagagttggtctgttactcggtggtggcggagtctacggaagccgttttcgcttcacttttcctggctgtagagcgctttccccctggcgggtgagavtgcagagacgaaggtgcgagatgagcactatgttcgcggacactctcctcatcgtttttatctctgtgtgcacggctctgctcgcagagggcataacctgggtcctggtttacaggacagacaagtacaagagactgaaggcagaagtggaaaaacagagtaaaaaattggaaaagaagaaggaaacaataacagagtcagctggtcgacaacagaaaaaraaaatagagagacddkaakasamcctgargaataacaacagagatctatcaatggttcgaatgaaatccatgtttgctattggcttttgttttactgccctaatgggaatgttcaattccatatttgatggtagagtggtggcaaagcttccttttacccctctttcttasrtcsraggactgtctcatcgaaatctgctgggagatgacaccacagactgttccttcattttcctgtawattctctgtactatgtcgattcgacagaacattcagaagattctcggccttgccccttcacgagccgccaccaagcaggcaggtggatttcttggcccaccacctccttctgggaagttctcttgaactcaagaactctttattttctakcattctttctagacacacacacatcagactggcaactgttttgtascaagagccataggtagccttackacttgggcctctttctagttttgaattatttctaagccttttgggtatkattagagtgaaaatggcagccagcaaacttgatagtgcttttggtcctagatgatttttatcaaataagtggattgattagttaagttcaggtaatgtttatgtaatgaaaaacaaatagcatccttcttgtttcatttacataagtattttctgtgggaccgactctcaaggcactgtgtatgccctgcaagttggctgtctatgagcatttagagatttagaagaaaaatttagtttgtttaacccttgtaactgtttgttttgttgttgtttttttttcaagccaaatacatgacataaratcaataaaraggccaaatttttasctgttttatgtaaaaaaaaaaa

SEQ ID NO: 303 - DNA, 978 bp, Homo sapiens
  CDS 86..709
  sig_peptide 86..361: Von Heijne matrix score 6.30000019073486 seq LLMSILALIFIMG/NS
  polyA_signal 943..948
  polyA_site 963..973
aaagcatccttccctaggactgctgtaagctttgagcctctagcaggagacatgcctcggggacgaaagagtcggcgccgccgtaatgcgagagccgcagaagagaaccgcaacaatcgcaaaatycrrggcstvagagggcctccgagacccctatggccgcctctgtggtagcgagcacccccgaagaccacctgagcggcccgaggaagacccgagcactccagaggaggcctctaccacccctgaagaagcctcgagcactgcccaagcacaaaagccttcagtgccccggagcaattttcagggcaccaagaaaagtctcctgatgtctatattagcgctcatcttcatcatgggcaacagcgccaaggaagctctggtctggaaagtgctggggaagttaggaatgcagcctggacgtcascacagcatctttggagatccgaagaaratcgtcacagaarantttgtgcgcagagggtacctgatttataraccggtgccccgtabcagtccggtggagtatgasttcttctgggggccccgagcacacgtggaatcgagcaractgaaastcwtgcattttgtggcaagggttcgtaaccgatgctctaaagactggccttgtaattatgactgggattcggacgatgatgcagaggttgaggctatcctcaattcaggtgctargggttattccgccccttaagtaratctgaggcagacccttgggggtgtaaaagagagtcacaggtaccccaaggagtagatgccagggtcctaagttgaaaatgmtgtcgattgggggcgggggacactgtatttgatatttgtgatcagtgatcattgttcaactgcgaaatagagtgtttgcttttgataatggaaaattgtattcgttttaaaattccgtttgttgagaataacaatatgtttaaaaatataattgaacaaattttaaaaaaaaaaamcccy

SEQ ID NO: 304 - DNA, 810 bp, Homo sapiens
  CDS 63..320
  sig_peptide 63..179: Von Heijne matrix score 3.90000009536743 seq VLAIGLLHIVLLS/IP
  polyA_signal 771..776
  polyA_site 799..810
agggaaccgatcccgggccgttgatcttcggccccacacgaacagcagagaggggcatcaggatgaatgtkggcacagcgcacagsdaggtgaaccccaacacgcgggtkatgaacagccgtggcatctggctctcctacgtgctggccatcggtctcctccacatcgtgctgctgagcatcccgtttgtkagtgtccctgtcgtctggaccctcaccaacctcattcacaacatgggcatgtatatcttcctgcacacggtgaaggggacaccctttgagaccccggaccagggcaaggcgaggctgctaacccactggtgagcagatggattatggggtccagttcacggcctctcggaakttcttgaccatcacacccatcgtgctgtacttcctcaccagcttctacactaaktacraccaaatccattttgtgctcaacaccgtgtccctgatragcgtgcttatccccaagctgccccagctccacggaktccggatttttggaatcaataaktactgaaaktgcasccccttcccctgcccagggtggcaggggaggggtagggtaaaaggcatktgctgcaachctgaaaacaraaaraararscctctggacactgccararatgggggttgagcctctggcctaatttcccccctcgcttcccccagtagccaacttggagtagcttgtaytggggttggggtaggccccctgggctctgaccttttctgaattttttgatcttttccttttgctttttgaatararactccatggagttggtcatggaaaaaaaaaaaa

SEQ ID NO: 305 - DNA, 771 bp, Homo sapiens
  CDS 299..418
  sig_peptide 299..379: Von Heijne matrix score 3.59999990463257 seq LTLLLITPSPSPL/LF
  polyA_signal 739..744
  polyA_site 762..771
accttgggctccaaattctagctcataaagatgcaagtkttgcaatttcctataaatggttaagaaaagagcaagctgtccagagagtgagaagtttgaaaagagaggtgcataagagagaaatgatgtccatttgagccccaccacggaggttatgtggtcccaaaaggaatgatggccaagcaattaatttttcctcctagttcttagcttgcttctgcattgattggctttacacaactggcatttagtctgcattacacaaatagacactaatttatttggaacaagcagcaaaatgagaactttatttggtgcagtcagggctccatttagttccctcactctgcttctaatcaccccttctcccagccctcttctatttgatagaggtctgtccctcagatcagcaatgtcttagcccctctcctctcttccattccttcctgttggtactcatttcttctaacttttaataaacatttaggtataatacattacagtaagtgctatttagatacaaacttaaaacatactatatattttaaggatctaagaatcctttararrrggcacatgactgaagtacctcagctgcgcagcctgtaaccagtttttttaatgtaaaagtaaraatgccagccttaacctabccctgcarataaaagctaacttttattaataccagccctgaataatggcactaatccacactcttccttaragtgatgctggaaaaataaaatcaggggcttcagattaaaaaaaaaa

SEQ ID NO: 306 - DNA, 409 bp, Homo sapiens
  CDS 186..380
  sig_peptide 186..233: Von Heijne matrix score 4 seq FFLFLSFVLMYDG/LR
  polyA_signal 383..388
  polyA_site 396..409
ataaaagaagcagcaaatagaatttcccacaaagtaagttgactctaaatcttaagtattacctagttttttaaaggtttgaatataataatgcagtatttgcagtataaaaaggaaggaatttgtagagaatcattttggtgctcaagtctcttagcagtgccttattgcctcatagcaagaagatgctggggttttttttgtttttgtcctttgtattaatgtatgatggtttgcgcctttttggcattctttcaacatgtcgtgtacatcacaccatgaatcagttcctaattgatatatctagctttacctcccgagttaaaaaaaaaatctttttattttatgccttcawaggttgcycgtttcaragtgccacataaataaaatgtttaacaaaaaaaaaaaa

SEQ ID NO: 307 - DNA, 613 bp, Homo sapiens
  CDS 69..458
  sig_peptide 69..233: Von Heijne matrix score 4 seq AALCGISLSQLFP/EP
  polyA_signal 564..569
  polyA_site 602..613
aagaacctgagcagcctgtcttcagacagagagaggcccacggctgtttcttgaaaytggcgctgggaatggccatgtggaacaggccatgbbagangctgcctcagcagcctctsstagctgagcccactgcagagggggagccacacctgcccacgggccgggasbygactgaggccaaccgcttcgcctatgctgccctctgtggcatctccctgtcccagttatttcctgaacccgaacacagctccttctgcacagagttcatggcaggcctggtgckmtggctggagttgtctgaagctgtcttgccaaccatgactgcttttgcgagcggcctgggaggtgaaggascavmatgtgtttgttcaaattttactgaaggaccccatcttgaaggacgacccgacggtgatcactcaggaccttctgagcttctcactcaaggatgggcactatgacscccgggccagagtcctcgtttgccacatgacctccctgctccaagtgcccttggaggagctggatgtccttgaaaagatgttcctggagagcctgaaggaaatcaaagaagaggaatctgaaatggccgaggcatcccraaaaaaaaaaa

SEQ ID NO: 308 - DNA, 986 bp, Homo sapiens
  CDS 12..638
  sig_peptide 12..263: Von Heijne matrix score 4.19999980926514 seq ITMLQMLALLGYG/LF
  polyA_signal 951..956
  polyA_site 975..985
accctatcaagatggtcaacttcccccagaaaattgcaggtgaactctatggacctctcatgctggtcttcactctggttgctatcctactccatgggatgaagacgtctgacactattatccgggagggcaccctgatgggcacagccattggcacctgcttcggctactggctgggagtctcatccttcatttacttccttgcctacctgtgcaacgcccagatcaccatgctgcagatgttggcactgctgggctatggcctctttgggcattgcattgtcctgttcatcacctataatatccacctccgcgccctcttctacctcttctggctgttggtgggtggactgtccacactgcgcatggtagcagtgttggtgtctcggaccgtgggccccacacadcggmtgctcctctgtggcaccctggctgccctacacatgctcttcctgctctatctgcattttgcctaccacaaadtggtadaggggatcctggacacactggagggccccaacatcccgcccatccagagggtccccagagacatccctgccatgctccctgctgctcggcttcccaccaccgtcctcaacgccacagccaaagctgttgcggtgaccctgcagtcacactgaccccacctgaaattcttggccagtcctctttcccgcagctgcagagaggargaasactattaaaggacagtcctgatgacatgtttcgtagatggggtttgcagctgccactgagctgtagctgcgtaagtacctccttgatgcctgtcggcacttctgaaaggcacaaggccaagaactcctggccaggactgcaaggctctgcagccaatgcagaaaatgggtcagctcctttgagaacccctccccacctaccccttccttcctctttatctctcccacattgtcttgctaaatatagacttggtaattaaaatgttgattgaagtctggaaaaaaaaaaat

SEQ ID NO: 309 - DNA, 1447 bp, Homo sapiens
  CDS 282..389
  sig_peptide 282..332: Von Heijne matrix score 3.5 seq RWWCFHLQAEASA/HP
  polyA_signal 1413..1418
  polyA_site 1437..1447
ataataatatctaaaaagctaaattttaaataccagctttacataaatgattgtkgactctggtctgtktctgacacctttccagaaaaaagtcaattgttcaggtacaccaaagaggaagaagagctgtggaggccaccctctacaaagctttatagaacttctggatctaactcacaaacaagcttccagaagagactagagaccttaggccaggagatgaaggagttcagtagcaaagtcacacctgtccaattccctgagctttgctcactcagctaatgggatggcaaaggtggtggtgctttcatcttcaggcagaagcctctgcccatccccctcaagggctgcaggcccaattctcatgctgcccttgggtgggcatctgttaacaaadgaaaacgtctgggtggcggcagcasctttgctctgagtgcctacaaagctaatgcttggtgctagaaacatcatcattattaaacttcagaaaagcagcagccatgttcagtcaggctcatgctgcctcactgcttaagtgcctgcaggagccgcctgccaarctccccttcctacacctggcacactggggtctgcacaaggctttgtcaaccaaaracagcttcccccwwttgattgcctgtagactttggagccaaraaacactctgtgtgactctacacacacttcaggtggtttgtgcttcaaagtcattgatgcaacttgaaaggaaacagtttaatggtggaaatgaactaccatttataacttctgtttttttattgagaaaatgattcacgaakkccaaatcagattgccaggaagaaataggacgtgacggtactgggccctgtgattctcccagcccttgcagtccgctaggtgagaggaaaagctctttacttccgcccctggcagggacttctgggttatgggagaaaccagagatgggaatgaggaaaatatgaactacagcagaagcccctgggcagctgtgatggagcccctgacattactcttcttgcatctgtcctgccttctttccctctgcgaggcagtggggtgggattcagagtgcttagtctgctcactgggagaagaagagttcctgcgcatgcaagccctgctgtgtggctgtcgtttacatttgggaggtgtcctgtatgtctgtacgttggggactgcctgtatttggaagatttaaaaacctagcatcctgttctcaccctctaagctgcattgagaaatgactcgtctctgtatttgtattaagccttaacacttttcttaagtgcattcggtgccaacattttttagagctgtaccaaaacaaaaagcctgtactcacatcacamtgtcattttgataggagcgttttgttatttttacaaggcagaatggggtgtaacagttgaattaaacttagcaatcacgtgctcaaaaaaaaaaa

SEQ ID NO: 310 - DNA, 1641 bp, Homo sapiens
  CDS 208..339
  sig_peptide 208..294: Von Heijne matrix score 5.59999990463257 seq LFLQLLVSHEIVC/AT
  polyA_site 1631..1641
agaaccgtgatgggaagatggacaaggaagagaccaaagactggatccttccctcagactatgatcatgcagaggcagaagccaggcacctggtctatgaatcagaccaaaacaaggatggcaagcttaccaaggaggagatcgttgacaagtatgacttatttgttggcagccaggccacagattttggggaggccttagtacggcatgatgagttctgagctacggaggaaccctcatttcctcaaaagtaatttatttttacagcttctggtttcacatgaaattgtttgcgctactgagactgttactacaaactttttaagacatgaaaaggcgtaatgaaaaccatcccgtccccattcctcctcctctctgagggactggagggaagccgtgcttctgaggaacaactctaattagtacacttgtgtttgtaratttacacwwtgtattatgtattaacatggcgtgtttatttttgtatttttctctggttgggagtatkatatgaaggatcaaratcctcaactcacacatgtaracaaacattasctctttactctttctcaaccccttwtatgattttaataattctcacttaactaattttgtaagcctgagatcaataagaaatgttcaggagagaggaaagaaaaaaaatatatgctccacaatttatatttagagagagaacacttagtcttgcctgtcaaaaagtccaacatttcataggtagtaggggccacatattacattcagttgctataggtccagcaactgaacctgccattacctgggcaaggaaagatccctttgctctaggaaagcttggcccaaattgattttcttctttttccccctgtaggactgactgttggctaattttgtcaagcacagctgtggtgggaagagttagggccagtgtcttgaaaatcaatcaagtagtgaatgtgatctctttgcaragctatagatagaaacagctggaaaactaaaggaaaaatacaagtgttttcggggcatacattttttttctgggtgtgcatctgttgaaatgctcaagacttaattatttgccttttgaaatcactgtaaatgcccccatccggttcctcttcttcccargtgtgccaaggaattaatcttggtttcactacaattaaaattcactcctttccaatcatgtcattgaaagtgcctttaacgaaagaaatggtcactgaatgggaattctcttaagaaaccctgagattaaaaaaagactatttggataacttataggaaagcctagaacctcccagtagagtggggatttttttcttcttccctttctcttttggacaatagttaaattagcagtattagttatgagtttggttgcagtgttcttatcttgtgggctgatttccaaaaaccacatgctgctgaatttaccagggatcctcatacctcacaatgcaaaccacttactaccaggcctttttctgtgtccactggagagcttgagctcacactcaaagatcagaggacctacagagagggctctttggtttgaggaccatggcttacctttcctgcctttgacccatcacaccccatttcctcctctttccctctccccgctgccaaaaaaaaaaa

SEQ ID NO: 311 - DNA, 884 bp, Homo sapiens
  CDS 69..557
  sig_peptide 69..224: Von Heijne matrix score 4.69999980926514 seq LGLALGRLEGGSA/RH
  polyA_signal 849..854
  polyA_site 870..883
attggctccggatcgtgcgtgaggcggcttcgtgggcagcgagagtcacagacaagacagcaagcaggatggagcactaccggaaagctggctctgtagagctcccagcgccttccccaatgccccagctacctcctgatacccttgagatgcgggtccgagatggcagcaaaattcgcaacctgctggggttggctctgggtcggttggagggcggcagtgctcggcatgtagtgttctcaggttctggcagggctgcaggaaaggctgtcagctgcgctgagattgtcaagcggcgggtcccgggcctgcaccagctcaccaagctacktttccttcaaactgaggacagctgggtcccascctcacctgacacagggctaraccccctcacagtgcgccgccatgtgcctgcaktgtgggtgctgctcasccgggaccccctggaccccaatgagtgtggttaccaacccccaggagcaccccctggcctgggttccatgcccagctccagctgtggccctcgttcccraaaaagggctcraracacccgatcgtgaaaacctgctgasccagcctgttctccgggcctraatgtctggggtgcttgtgccttttctranaagcgttgtgaskgctcaacatccccatcaaggtttgagtccacaaaagtggacctccctatcatgcttccccttccctctagcatgtgggaagggactgctgtgaagaatgacagatgtggggcctctgccaagttctgcattgctaaataagggcttcctctgccttctacctacagtgcatttgaactgccttctgaaagaggtccakggagggatttaggaaataaagtttctacctatttgaaaaaaaaaaaacac

SEQ ID NO: 312 - DNA, 729 bp, Homo sapiens
  CDS 134..325
  sig_peptide 134..274: Von Heijne matrix score 5.90000009536743 seq TWLGLLSFQNLHC/FP
  polyA_site 718..729
atcattttcttatccctgctgatttcaaaccttcccatggtttagaagcataacctgtaatgtaatgcaagtcccctaactccctggttgctaacattaacttccttaagtaataatcaatgaaagavattctatgcatggttttgaaataatatccttgaaagaggaatcaccattaggaaaggtgagtcagggtcctttgtttaatgtgactagtggctcatcatcaccagtgacctggttgggcctactctccttccagaacctgcattgcttcccagacctccccactgagatgcctctaaragccaaaggaktcaacacttgagcctagggtgggctacaacaaaarattctaatttaccttgcttcatctaggtccaggccccaaktagcttgctgaaggaacttaaaaagtagctgttatttattgtattgtataasctaaaaacatttatttttgttgaatcraaacaattccatgtascaatcttttttctgttcacggtgtttgtgataaaaccttaaattccgcaagcatcagttttttgaaaaaatgggaattgaccggatagwwacaggcaaagwtataaatagctacaacatcatttaacttttataaacatgccttctctctattgaaracatctgatatttttgctggaaagttggatctatcctcagtaactctgccatgaattcctgtttcckggttccaaaaaaaaaaaa

SEQ ID NO: 313 - DNA, 1013 bp, Homo sapiens
  CDS 78..731
  sig_peptide 78..227: Von Heijne matrix score 5.09999990463257 seq RTALILAVCCGSA/SI
  polyA_site 1002..1013
agtttccaagggaaggagcagcgtgtgggaaagcacagaagagtgagaaggaagcgactaaattttatttactttctatgcatcatggcctcacaccactgttacttggtgtacatgagcaaaaacagcaagtggtgaaatttttaatcaagaaaaaagcaaatttaaatgcactggatagatatggaagaactgctctcatacttgctgtatgttgtggatcggcaagtatagtcagccttctacttgagcaaaacattgatgtatcttctcaagatctatctggacagacggccaaaaagtatgctgtttctagtcgtcataatgtaatttgccagttactttctgactacaaaraaaaacagatrctaaaagtctcttctgaaaacagcaatccaraacaagacttaaagctgacatcagaggaagagtcacaaaggcttaaaggaagtgaaaatagccagccagaggaaatgtctcaagaaccagaaataaatargggtggtgatagaaaggttgaaraaraaatgaaraagcacggaagtwctcatatgggattcccaraaaacctgmctaacggtgccactgctgacaatggtgatgatggattaattccmccarggaaaascaraacacctgaaagccascaatttcctgacactgagaatgaacagtatcacagggacttttctggccatcccmactttcccacdacccttcccatcaaacagtgatgaacaaaatgatactchsaagcmmctttctgaagamcaraacactggaatattacaagatgagattctgattcatgaagaaaagcagatagaagtggctgaaaatgaattctgagctttctcttagttataaraaagaaaaagacctcttgcatgaaaatagtacgttgcaggaagaaattgtcatgctaaractggaactagacktaatgaaacatcagagccagctaararaaaaraaatatttggaggaaattgaaagtgtggaaaaaaaaaaaa

SEQ ID NO: 314 - DNA, 973 bp, Homo sapiens
  CDS 46..693
  sig_peptide 46..90: Von Heijne matrix score 7.59999990463257 seq CVLVLAAAAGAVA/VF
  polyA_signal 937..942
  polyA_site 962..973
aagcggctggtccccggaagttggacgcatgcgccgtttctctgcatggtgtgcgttctcgttctagctgcggccgcaggagctgtggcggttttcctaatcctgcgaatatgggtagtgcttcgttccatggacgttacgccccgggagtctctcagtatcttggtagtggctgggtccggtgggcataccactgagatcctgaggctgcttgggagcttgtccaatgcctactcacctagacattatgtcattgctgacactgatgaaatgagtgccaataaaataaattcttttgaactaratcgagskgatagaraccctagtaacatgtwtaccaaatactacattcaccgaattccaaraagccgggaggttcagcagtcctggccctccaccgtttycaccaccttgcactccatgtggctctccttkcccctaattcacagggtgaagccaratttggtgttgtgtaacggaccaggaacatgtgtycctatctgtgtatctgcccttctccttgggatactaggaataaagaaagtgatcattgtctacgttgaaagcatctgccgtgtaaaaacsttatccatgtccggaaagattctgtttcatctctcaaattacttcattgttcagtggccggctctgaaagaaaagtatcccaaatcggtgtaccttgggcgaattgtttgacaaatggcaactgacttctttagaattttgcasttaacagtartatgtactcaaattggggggaaaaaaaccctacatgtttcttgtaaaggcgtctgacagtcctgaraattattgatggtaaggaataaaaaatgtwcagatractcagtgaaraaactgaggcttctcttatgaaacaaacattgataaacgtaactacyaaatgtttatgcctctgtaaaccaaatttcttttctarataaaaatatgtattactacctgcaaaaaaaaaaaa

SEQ ID NO: 315 - DNA, 868 bp, Homo sapiens
  CDS 126..527
  sig_peptide 126..182: Von Heijne matrix score 3.90000009536743 seq ILFHGVFYAGGFA/IV
  polyA_signal 834..839
  polyA_site 856..867
actggaagaactcgtcatgctctttgtagcgtggtgcttctgttgctcacaggacaacttgcctttgatgattttcaagagagttgtgctatgatgtggcaaagtatgcaggaagcaggcggtcaatgcctctgggagcaaggatccttttccacggtgtgttctatgccgggggctttgccattgtgtattacctcattcaaaagtttcattccaggactttatattacaagttggcagtggarcagctgcararccatcccgaggcacaggaagctctgggccctcctctcaacatccattatctcaagctcatcgacagggaaaacttcgtggacattgttratgccaagttgaaaattcctgtctctggatccaaatcagagggccttctctacgtccactcatccagaggtggcccctttcagaggtggcaccttgacgaggtctttttagagctcaaggatggtcagcagattcctgtgttcaagctcagtggggaaaacggtgatgaagtgaaaaaggagtagagacgacccagaagacccagcttgcttctagtccatccttccctcatctctaccatatggccactggggtggtggcccatctcagtgacagacactcctgcaacccagktttccagccaccagtgggatgatggtatgtgccagcacatggtaattttggtgtaattctaacttgggcacaacgaatgctatttgtcatttttaaactgaatccgaaagaaactcctattataaatttaagataatgtaatgtatttgaaagtgctttgtataaaaaagcacatgataaaaggaatcagaattaataaaatgtttgttgatctttaaaaaaaaaaaah

SEQ ID NO: 316 - DNA, 519 bp, Homo sapiens
  CDS 66..320
  sig_peptide 66..113: Von Heijne matrix score 3.5 seq TALAAXTWLGVWG/VR
  polyA_signal 490..495
  polyA_site 508..519
aattagcgcgtaacgcasagactgcttgctgcggcagagacgccagakgtgcagctccagcagcaatggcagtgacggcgttggcggcgmrgacgtggcttggcgtgtggggcgtgaggaccatgcaagcccgaggcttcggctcggatcagtccgagaatgtcgaccggggcgcgggctccatccgggaagccggtggggccttcggaaagagagagcaggctgaagaggaacgatatttccgagcacagagtacagaacaactggcarctttgaaaaaacrccatgaagaagaratcgttcatcatagagaaggagattgagcgtctgcagaaagaaattgagcgccataagcagaagatcaaaatgctagaacatgatgattaagtgcacaccgtgtgccatagaatggcacatgtcattgcccacttctgtgtaaacatggttctggtttaactaatatttgtctgtgtgctactaacagattataataaattgtcatcagtgaaaaaaaaaaaa

SEQ ID NO: 317 - DNA, 1028 bp, Homo sapiens
  CDS 73..948
  sig_peptide 73..159: Von Heijne matrix score 4.40000009536743 seq IVLHLVLQGMVYT/EY
  polyA_site 1016..1028
agctttaaaggcctggccaggggaggagcacagatattttcctgtataattccagaatgtcttcagagagccatgcatggattgcttcattaccttttccatacgagaaaccacaccttcattgtcctgcacctggtcttgcaagggatggtttatactgagtacacctgggaagtatttggctactgtcaggagctggagttgtccttgcattaccttcttctgccctatctgctgctaggtgtaaacctgttttttttcaccctgacttgtggaaccaatcctggcattataacaaaagcaaatgaattattatttcttcatgtttatgaatttgatgaaktgatgtttccaaaaaacgtgaggtgctctacttgtgatttaaggaaaccagctcgatccaascactgcaktgtgtgtaactggtgtgtgcaccgtttcraccatcactgtgtttgggtgaacaactgcatcggggcctggaacatcaggtmcttcctcatctacgtcttgaccttgacggcctcggctgccaccgtcgccattgtgagcaccacttttctggtccacttggtggtgatgtcagatttataccaggagacttacatcgatgaccttggacacctccatgttatggacacggtctttcttattcagtacctgttcctgacttttccacggattgtcttcatgctgggctttgtcgtggttctgarcttcctcctgggtggctacctgttgtttgtcctgtatctggcggccaccaaccagactactaacgagtggtacagargtgactgggcctggtgccagcgttgtccccttgtggcctggcctccgtcagcagarccccaagtccaccggaacattcactcccatgggcttcggarcaaccttcaagaratctttctacctgcctttccatgtcatgagaggaagaaacaagaatgacmagtgtatgactgcctttgagctgtagttcccgtttatttacacatgtggatcctcgttttccaaaaaaaaaaaaa

SEQ ID NO: 318 - DNA, 452 bp, Homo sapiens
  CDS 69..434
  sig_peptide 69..236: Von Heijne matrix score 4.90000009536743 seq FACVPGASPTTLA/FP
  polyA_signal 419..424
  polyA_site 441..452
acagcgtgastcgcccgccagaagaatatgaaaaagcagagcganctcggttaagggaaagcgccgagatgacgggctttctgctgccgcccgcaagcagagggactcggagatcatgcagcagaagcagaaaaaggcaaacgagaagaaggaggaacccaagtagctttgtggcttcgtgtccaaccctcttgcccttcgcctgtgtgcctggagccagtcccaccacgctcgcgtttcctcctgtaktgctcacaggtcccavcaccgatggcattccctttgccctrnaktctgcagcgggtcccttttgtgcttccttcccctcaggtavcctctctccccctgggccactcccgggggtgagggggttaccccttcccagtgttttttattcctgtggggctcaccccaaagtattaaaagtagctttgtaattcaaaaaaaaaaaa

SEQ ID NO: 319 - DNA, 875 bp, Homo sapiens
  CDS 628..804
  sig_peptide 628..711: Von Heijne matrix score 4.19999980926514 seq LMPVIPALQEAXA/GG
  polyA_site 864..875
aaagatggacaccgcggaggaagacatatgtagagtgtgtcggtcagaaggaacacctgagaaaccgctttatcatccttgtgtatgtactggcagtattaagttngtccatcaagaatgcttagttcaatggctgaaacacagtcgaaaagaatactgtgaattatgcaagcacagatttgcttttacaccaatttattctccagatatgccttcacggcttccaattcaagacatatttgctggactggttacaagtattggcactgcaatacgatattggtttcattatacacttgtggcctttgcatggttgggagttgttcctcttacagcatgtgagtattcatgcctctgattggagttatttaaacattgcataactacttaatattataaagcaatattgcatcatattattatttgactgatgtttagttatttgatgtcagagtgtcatgtattaggaaagccttacttaraaratgttcatcggaactaaraatgaktttaacaggtcagttttttgagtgaatgtgggaaaraacacagcatacagaatggctaaccatgaaagttcatgaaagcgtkgaaaaaatcaaatcaaatcataattagatatgaagtatgctaragctttcaagggctacaaaaracggccgggcgcggtggcttatgcctgtaatcccagcacttcaggaggccgangcaggcggatcacgaggtcaggagtttgaaactagcctggccaacatggagactgaggcaggagaattgcttaaacccaggaggcggaggttgcartgaactgagatcgcaccactgcactccagcttgggcaacagagcaagactttgtctcgcaaaaaaaaaaaa

SEQ ID NO: 320 - DNA, 531 bp, Homo sapiens
  CDS 70..366
  sig_peptide 70..108: Von Heijne matrix score 3.5 seq MHLLSNWANPASS/RR
  polyA_signal 496..501
  polyA_site 521..531
aagtggccatggcggatacagcgactacagcatcggcggcggcggctagtgccgctagcgcctcgagcgatgcacctcctttccaactgggcaaaccccgcttccagcagacgtccttctatggccgcttcaggcacttcttggatatcatcgaccctcgcacactctttgtcactgagagacgtctcagagaggctgtgcagctgctggaggactataagcatgggaccctgcgcccgggggtcaccaatgaacagctctggagtgcacagaaaatcaagcaggctattctacatccggacaccaatgagaagatcttcatgccatttagaatgtcrggttatattccttttgggacgccaattgtaaktgttaccttcaaaggatttccttttctaaaaaattattttaratgtctaactttatgttattgctcacgggtatttgactgaattgttgatttaggataagtcaattcctggagggaaattaccaaataaaatgatatgtatttcttaccacaaaaaaaaa

SEQ ID NO: 321 - DNA, 1244 bp, Homo sapiens
  CDS 70..366
  sig_peptide 70..108: Von Heijne matrix score 3.5 seq MHLLSNWANPASS/RR
  polyA_site 1233..1244
aagtggccatggcggatacagcgactacagcatcggcggcggcggctagtgccgctagcgcctcgagcgatgcacctcctttccaactgggcaaaccccgcttccagcagacgtccttctatggccgcttcaggcacttcttggatatcatcgaccctcgcacactctttgtcactgagagacgtctcagagaggctgtgcagctgctggaggactataagcatgggaccctgcgcccgggggtcaccaatgaacagctctggagtgcacagaaaatcaagcaggctattctacatccggacaccaatgagaagatcttcatgccatttaraatgtcaggttatattccttttgggacgccaattgtagtcggtcttctcttgcccaaccagacactggcatccactgtcttctggcagtggctgaaccagagccacaatgcctgtgtcaactatgcaaaccgcaatgcraccaagccttcacctgcatccaagttcatccagggatacctgggagctgtcatcagcgccgtctccattgctgtgggccttatktcctggttcagaaagccaacaagttcaccccagccacccgccttctcatccagaggtttgtgccgttccctgctgtagccagtgccaatatctgcaatgtggtcctgatgcggtacggggagctggaggaagggattgatgtcctggacagcgatggcaacctcgtgggctcctccaagatcgcagcccgacacgccctgctggagacggcgctgacgcgagtggtcctgcccatgcccatcctggtgctacccccgatcgtcatgtccatgctggagaagacggctctcctgcaggcacgcccccggctgctcctccctgtgcaaagcctcgtgtgcctggcagccttcggcctggccctgccgctggccatcagcctcttcccgcaaatgtcagagattgaaacatcccaattagagccggagatagcccaggccacgagcagccggacagtggtgtacaacaaggggttgtgagtgtggtcagcggcctggggacggagcactgtgcagccggggagctgaggggcarggccgtagactcacggctgcacctgcagggagcagcacgccaaccccagcagtcctgggccccctgggagagtgctcaacctacagtggagggagactgacccattcacattttaacataggcaagaggagttctaacacatttcgtacaaaaaaaaaa

SEQ ID NO: 322 - DNA, 631 bp, Homo sapiens
  CDS 111..434
  sig_peptide 111..185: Von Heijne matrix score 3.90000009536743 seq WIAAVTIAAGTAA/IG
  polyA_site 618..631
aatcgcggagtcggtgctttagtacgccgctggcacctttactctcgccggccgcgcgaacccgtttgagctcggtatcctagtgcacacgccttgcaagcgacggcgccatgagtctgacttccagttccagcgtacgagttgaatggatcgcagcagttaccattgctgctgggacagctgcaattggttatctagcttacaaaagattttatgttaaagatcatcgaaataaagctatgataaaccttcacatccagaaagacaaccccaagatagtacatgcttttgacatggaggatttgggagataaagctgtgtactgccgttgttggaggtccaaaaagttcccattctgtgatggggctcacacaaaacataacgaagagactggagacaatgtgggccctctgatcatcaagaaaaaagaaacttaaatggacacttttgatgctgcaaatcagcttgtcgtgaagttacctgattgtttaattaraatgactaccacctctgtctgattcaccttcgctggattctaaatgtggtatattgcmaactgcagctttcacatttatggcatttgtcttgttgaaacatcgtggtgcacatttgtttaaacaaaaaaaaaaaa

SEQ ID NO: 323 - DNA, 781 bp, Homo sapiens
  CDS 19..567
  sig_peptide 19..63: Von Heijne matrix score 8.39999961853027 seq AMWLLCVALAVLA/WG
  polyA_signal 749..754
  polyA_site 771..781
aagtgctgcttacccatcatggaagcaatgtggctcctgtgtgtggcgttggcggtcttggcatggggcttcctctgggtttgggactcctcagaacgaatgaagagtcgggagcagggaagacggctgggagccgaaagccggaccctgctggtcatagcgcaccctgacgatgaagccatgttttttgctcccacagtgctaggcttggcccgcctaaggcactgggtgtacctgctttgcttctctgcaggaaattactacaatcaaggagagactcgtaagaaagaacttttgcaragctgtgatgttttggggattccactctccagtgtaatgattattgacaacagggatttcccaratgacccaggcatgcagtgggacacaragcacgtggccaragtcctccttcagcacatagaagtgaatggcatcaatctggtggtgactttcgatgcagggggartaagtggccacagcaatcacattgctctgtatgcagctgtgaggaagcttgagggccaaatttgcaagccctgtggcactggacaagactttaaggaatgagtgctgtcaatcagtgtgcctccaccttcaccatcttcttccccttactctcacttccgtcatgtgttttatacaactctcaaatctttcttggagaaggaggatatacatacataatatgaaatgtgtttgttcttcacagtcacccgattttactgatatttatttgcattttaccaataaaaagaaaatgcaagctcaaaaaaaaaaa

SEQ ID NO: 324 - DNA, 931 bp, Homo sapiens
  CDS 19..312
  sig_peptide 19..63: Von Heijne matrix score 8.39999961853027 seq AMWLLCVALAVLA/WG
  polyA_signal 896..901
  polyA_site 921..931
aagtgctgcttacccatcatggaagcaatgtggctcctgtgtgtggcgttggcggtcttggcatggggcttcctctgggtttgggactcctcagaacgaatgaagagtcgggagcagggargacggctgggagccgaaagccggaccctgctggtcatagcgcaccctgacgatgaagccatgttttttgctcccacagtgctaggcttggcccgcctaaggcactgggtgtacctgctttgcttctctgcagttttccgtagggagctaagtgaatacaccgaargtcttacctctgaacccctcamagcctagggacaggarcggccggcttacctggtgggttgggggacgtcggcagctcrcgtactacgccagcaggattgangancacagaaacagttgchsttggttgtattcagtacctkcatttccgttgggaactccaccwgtacttgttatkctgtggaacttttttttatttgtagaaggagcaagaatattgaccttactatatagcacacgaaacaatctatgctgtatcgtgcctgctcaatccttaaagttaacttctaatgatagtaaaaraccttcctgctgcctttaaaatgcagcttgtgctaktaacatgcatgtgtcaaattgaaraattagacatagatgactarataraaagtaattttgtaggtaattttaragttcaactccacccagctttcaktgaaggaacctttcaaataataratttttgcttaccatararaaaaratcaaatgacaaagcaaatattgaccattaagctggaatatggtgataattgaacagttgtataaatgaaktaattgaattgtacacatacaatgggtgaattttatggcatgtcaaagtatacctcaataaagctatttttttaaattgcmaaaaaaaaaaa

SEQ ID NO: 325 - DNA, 849 bp, Homo sapiens
  CDS 64..612
  sig_peptide 64..234: Von Heijne matrix score 3.79999995231628 seq QLWLVMEFCGAGS/VT
  polyA_site 839..849
acatacgggcaagtttataagggtcgtcatgtcaaaacgggccagcttgcagccatcaaggttatggatgtcacaggggatgaagaggaagaaatcaaacaagaaattaacatgttgaagaaatattctcatcaccggaatattgctacatactatggtgcttttatcaaaaagaacccaccaggcatggatgaccaactttggttggtgatggagttttgtggtgctggctctgtcaccgacctgatcaagaacacaaaaggtaacacgttgaaagaggagtggattgcatacatctgcmsggaaatcttacgggggctgartcacctgcaccagcataaagtgattcatcgaratattaaagggcaaaatgtcttgctgactgaaaatgcagaagttaaactagtggactttggartcaktgctcagcttgatcgaacagtgggcaggargaatactttcattggaactccctactggatggcaccaraagttattgcctgtgatgaaaacccasatgccacatatgatttcaarartgacttgtggtctttgggtatcaccgccattgaaatggcagaagggctccccctctctgtgacatgcaccccatgagagctctcttcctcatcccccggaatccagcgcctcggctgaagtctaagaagtggtcaaaaaaattccagtcatttattgagagctgcttggtaaaaaatcacagccagcgaccagcaacagaacaattgatgaagcatccatttatacgagaccaacctaatgagcgacaggtccgcattcaactcaaggaccatattgatagaacaaagaagaagcgaggaaaaaaaaaaa

SEQ ID NO: 326 - DNA, 644 bp, Homo sapiens
  CDS 39..458
  sig_peptide 39..80: Von Heijne matrix score 4.40000009536743 seq FLTALLWRGRIPG/RQ
  polyA_signal 613..618
  polyA_site 633..644
agcggagacgcagagtcttgagcagcgcgncaggcaccatgttcctgactgcgctcctctggcgcggccgcattcccggccgtcagtggatcgggaagcaccggcggccgcggttcgtgtcgttgcgcgccaagcagaacatgatccgccgcctggagatcgaggcggagaaccattactggctgagcatgccctacatgacccgggagcaggagcgcggccacgccgcgttgcgcaggagggaggccttcgaggccataaaggcggccgccacttccaagttccccccgcatagattcattgcggaccagctcgaccatctcaatvgtcaccaagaaatggtcctaatcctgagtcgtcacccttggattttatggatcacggagctgaccatctttacctggtctggactgaaaaactgtagcttgtgtgaaaatgagctttggaccagtctttattaaaacaaacaaacatgagtagtctgcatatcgaatatctagagctctaaaccccccaatacttaaaagtctaattgctgtcctgtggtttcattagtctgataggaagatagggatttcctcagtcacagatgatattttgaaggaaagctgcaataaagccacaatgatttgaaaaaaaaaaaa

SEQ ID NO: 327 - DNA, 918 bp, Homo sapiens
  CDS 9..185
  sig_peptide 9..50: Von Heijne matrix score 3.70000004768372 seq AALVTVLFTGVRR/LH
  polyA_site 906..918
agctcagcatggctgctttagtgactgttctcttcacaggtgtccggaggctgcactgcagcgcrscgcttgggcgggcggccagtggcgrctacagcaggaactggctgccaacccctccggctacgggccccttaccgagctcccagactggtcatatgcggatggccgccctgctcccccaatgaaaggccagcttcgaaaaaaagctgaaagggagacktttgcaaracrakttgtactgctgtcacaggaaatggacgctggattacaascatggcasctcaggcagcaraakttgcaggaaraacaaaggaagcaggaaaatgctcttaaacccaaaggggcttcactgaaaascccacttccaaktcaataaaaagcaactcctgcctcccttcctcaccctgtctctggatttcttttctatcacctaratgcttcatccagccaraaaatagccttcackktccccatctgtcttcaragcaaaaragctgggacmccaaraacaagctgttaratcactgcctgggaggcttggcttartactctcatctctggttccattccagttcagctaagtcttgctttaaaatttttacctcctagctgggtgcggtggctcacgcctgtaatcccagcactttgggaggctgaggcgggcagatcacaagatcaggagttcgagaccagcctggccaacccagcctggtcaacatggtgaaaccctgtccctactaaagatacaaacaattagccgggcgtggtggggtgcgcttgtaatcccagctactcaggaggctgaggcaggagaatcgcttaaactcgggaggtagaggttgcagtgagccaaggtcacaccattgcactccaacctgggcgacagggcgagactctgtctcaaaaaaaaaaaaa

SEQ ID NO: 328 - DNA, 472 bp, Homo sapiens
  CDS 14..316
  sig_peptide 14..121: Von Heijne matrix score 5.19999980926514 seq PLRLLNLLILIEG/SV
  polyA_signal 442..447
  polyA_site 458..471
attatatagagccatggggccttacaacgtggcagtgccttcagatgtatctcatgcccgcttttatttcttatttcatcgaccattaaggctgttaaatctgctcatccttattgagggcagtgtcgtcttctatcagctctattccttgctgcggtcggagaagtggaaccacacactttccatggctctcatcctcttctgcaactactatgttttatttaaacttctccgggacagawtaktattaggcagggcatactcctacccactcaacagttatgaactcaaggcaaactwagctgcctctcawcaatgagggagaactcagataaaaatattttcatacgttctatttttttcttgtgatttttataaatatttaagatattttatattttgtatactattatgttttgaaagtcgggaagagtaagggatattaaatgtatccgtaaacaaaaaaaaaaam

SEQ ID NO: 329 - DNA, 1504 bp, Homo sapiens
  CDS 70..1092
  sig_peptide 70..234: Von Heijne matrix score 4.09999990463257 seq AVCAALLASHPTA/EV
  polyA_signal 1475..1480
  polyA_site 1493..1504
agaaatcgtaggacttccgaaagcagcggcggcgtttgcttcactgcttggaagtgtgagtgcgcgaagatgcgaaaggtggttttrattaccggggctagcagtggcattggcctggccctctgcaagcggctgctggcggaagatgatgagcttcatctgtgtttggcgtgcaggaatatgagcaaggcagaagctgtctgtgctgctctgctggcctctcaccccactgctgaggtcaccattgtccaggtggatgtcagcaacctgcagtcattcttccgggcctccaaggaacttaagcaaaggtttcagagattagactgtatatatctaaatgctgggatcatgcctaatccacaactaaatatcaaagcacttttctttggcctcttttcaagaaaagtgattcatatgttctccacagctgaaggcctgctgacccagggtgataagatcactgctgatggacttcaggaggtgtttgagaccaatgtctttggccattttatcctgattcgggaactggagcctctcctctgtcacagtgacaatccatctcagctcatctggacatcatctcgcagtgcaaggaaatctaatttcagcctcgaggacttccagcacagcaaaggcaaggaaccctacagctcttccaaatatgccactgaccttttgagtgtggctttgaacaggaacttcaaccagcagggtctctattccaatgtggcctgtccaggtacagcattgaccaatttgacatatggaattctgcctccgtttatatggacgctgttgatgccggcaatattgctacttcgcttttttgcaaatgcattcactttgacaccatataatggaacagaagctctggtatggcttttccaccaaaagcctgaatctctcaatcctctgatcaaatatctgagtgccaccactggctttggaagaaattacattatgacccagaagatggacctagatgaagacactgctgaaaaattttatcaaaagttactggaactggaaaagcacattagggtcactattcaaaaaacagataatcaggccaggctcagtggctcatgcctataattccagcactttgggaggccaaggcagaaggatcacttgagaccaggagttcaagaccagcctgagaaacatagtgagcccttgtctctacaaaaagaaataaaaataatagctgggtgtggtggcatgcgcatgtagtcccagctactcagaaggatgaggtgggaggatctcttgaggctgggaggcagaggttgcagtgagctgagattgtgccactgcactccagcctgggtgacagcgagaccctgtctcaaaatatgtatatatttaatatatatataaaaccagagctgacaatgacactctggaacattgcataccttctgtacattctggggtacatggatttctactgagttggataatatgcatttgtaataaactatgaactatgaaaaaaaaaaaa

SEQ ID NO: 330 - DNA, 765 bp, Homo sapiens
  CDS 274..597
  sig_peptide 274..399: Von Heijne matrix score 5.19999980926514 seq LLFDLVCHEFCQS/DD
  polyA_signal 731..736
  polyA_site 754..765
accaggaacatccagctatttatgatagcatttgcttcattatgtcaagttcaacaaatgttgacttgctggtgaaggtgggggaggttgtggacaagctctttgatttggatgagaaactaatgttaagaatgggtcagaaatggggctgctcagcctctggaccaaccccaggaagagtctgaagagcagccagtgtttcggcttgtgccctgtatacttgaagctgccaaacaagtacgttctgaaaatccagaatggcttgatgtttacatgcacattttacaactgcttactacagtggatgatggaattcaagcaattgtacattgtcctgacactggaaaagacatttggaatttactttttgacctggtctgccatgaattctgccagtctgatgatccagccatcattcttcaaraacaraaaacrgtgctagcctctgttttttcagtgttgtctgccatctatgcctcacagactgagcaagaktatctaaarataraaaaaggagacggtggctcagggagtaaaggaaggccakttgancaaacagaaktgttcctctgcatttcaaaaccttcttcctttctatagccctgtggtggaagattttattaaaatcctacgtgaagttgataaggcgcttgctgatgacttggaaaaaaacttcccaagtttgaaggttcagacttaaaacctgaattggaattacttctgtacaagaaataaactttatttttctcactgacaaaaaaaaaa

SEQ ID NO: 331 - DNA, 1041 bp, Homo sapiens
  CDS 230..469
  sig_peptide 230..307: Von Heijne matrix score 4.90000009536743 seq VLCTNQVLITARA/VP
  polyA_signal 1004..1009
  polyA_site 1027..1040
aacttccaagttgtagtgttgttgttttcagcctgctgctgctgctgctattgcggctaggggaaccgtcgtggggaaggatggtgtgcgaaaaatgtgaaaagaaacttggtactgttatcactccagatacatggaaagatggtgctaggaataccacagaaagtggtggaagaaagctgaatgaaaataaagctttgacttcaaaaaaagccagaattgatccataatggaagaaataagttctccacttgtagaatttgtaaaagttttgtgcaccaaccaggttctcattactgccagggctgtgcctacaaaaaaggcatctgtgcgatgtgtggaaaaaaggttttggataccaaaaactacaagcaaacatctgtctagatgtattgatggaatttctggctttctaaatgattttactttctgccttgaattttcaaggcatagatgtcaacttacagaataacatgtkttaagataattaagtktaaaccagaraatttgattgttactcattttgctctcatgtkctaaaacagcaacagtgtaactagtcttttgttgtaaatggttattttccttataaaaattttaaaaactaagtggcaaattccatgaaaatatttctcagttctgtatgcacttttatttaacattattcatataattctccccccaccactttatttataaatactgcaaaaktgaraaggagataataaatactttgctctgaatttggcatccaaagttaacatttctcccctcactcccttgctggtgtcatagttattagaatcagcagcctcttaactaattgcggtttcataggatatataaatgtttcaagccattattgctgaatggttctttagttattaacctagacccaaatcaaagaccagttggatttatgatattttttatttgttcttgcagccaaagtgccagtttctttaatatgtgaccaagaacacaaggagcatccatatggccaaataaatacactgaattttagaaaaacaaaaaaaaaar

SEQ ID NO: 332 - DNA, 1164 bp, Homo sapiens
  CDS 72..545
  sig_peptide 72..203: Von Heijne matrix score 5.5 seq ILFFTGWWIMIDA/AV
  polyA_site 1151..1162
aaagtcggcgtggacgtttgaggaagctgggatacagcatttaatgaaaaatttatgcttaagaagtaaaaatggcaggcttcctagataattttcgttggccagaatgtgaatgtattgactggagtgagagaagaaatgctgtggcatctgttgtcgcaggtatattgttttttacaggctggtggataatgattgatgcagctgtggtgtatcctaagccagaacagttgaaccatgcctttcacacatgtggtgtattttccacattggctttcttcatgataaatgctgtatccaatgctcaggtgagaggtgatagctatgaaagcggctgtttaggaagaacaggtgctcgagtttggcttttcattggtttcatgttgatgtttgggtcacttattgcttccatgtggattctttttggtgcatatgttacccaaaatactgatgtttatccgggactagctgtgttttttcaaaatgcacttatattttttagcactctgatctacaaatttggaagaaccgaagagctatggacctgagatcacttcttaagtcacattttccttttgttatattctgtttgtagataggttttttatctctcagtacacattgccaaatggagtagattgtacattaaatgttttgtttctttacatttttatgttctgagttttgaaatagttttatgaaatttctttatttttcattgcatagactgttaatatgtatataatacaagactatatgaattggataatgagtatcagttttttattcctgagatttagaacttgatctactccctgagccagggttacatcatcttgtcattttagaagtaaccactcttgtctctctggctgggcacggtggctcatgcctgtaatcccagcactttgggaggccgaggcgggccgattgcttgaggtcaagtgtttgagaccagcctggccaacatggcgaaaccccatctactaaaaatacaaaaattagccaggcatggtggtgggtgcctgtaatcccaactacctaggaggctgaggcaggagaatcgcttgaacccggggggcagaggttgyagtgagctgagtttgcgccactgcactctagcctgggggagaaagtgaaactccctctcaaaaaaaaaaaamc

SEQ ID NO: 333 - DNA, 1250 bp, Homo sapiens
  CDS 36..425
  sig_peptide 36..119: Von Heijne matrix score 11.6000003814697 seq LLLLVQLLRFLRA/DG
  polyA_signal 1215..1220
  polyA_site 1240..1250
atttcttccccccgagctgggcgtgcgcggccgcaatgaactgggagctgctgctgtggctgctggtgctgtgcgcgctgctcctgctcttggtgcagctgctgcgcttcctgagggctgacggcgacctgacgctactatgggccgagtggcagggacgacgcccagaatgggagctgactgatatggtggtgtgggtgactggagcctcgagtggaattggtgaggagctggcttaccagttgtctaaactaggagtttctcttgtgctgtcagccagaagagtgcatgagctggaaagggtgaaaagaagatgcctagagaatggcaatttaaaagaaaaagatatacttgttttgccccttgacctgaccgacactggttcccatgaaagcggctaccaaagctgttctccaggaatttggtagaatcgacattctggtcaacaatgtggaaatgtcccagcgttctctgtgcatggataccaacttggatgtctacagaaagctaatgagagcttaactacttagggacggtgtccttgacaaaatgtgkkctgcctcacatgatcgagangaarcaaggaaagattgttactgtgaatagcatcctgggtatcatatctgtacctctttccattggatactgtgctagcaagcatgctctccggggktkktttaatggccttcraacagaacttgccacatacccargtataatagtttctaacatttgcccaggacctgtgcaatcaaatattgtggaaaattccctagctggagaagtcacaaagactataggcaataatggagaccagtcccacaagatgacaaccagtcgttgtgtgcggctgatgttaatcagcatggccaatgatttgaaagaagtttggatctcagaacaacctttcttgttagtaacatatttgtggcaatacatgccaacctgggcctggtggataaccaacaagatggggaagaaaaggattgagaactttaagagtggtgtggatgcagactcttcttattttaaaatctttaagacaaaacatgactgaaaagagcacctgtacttttcaagccactggagggagaaatggaaaacatgaaaacagcaatcttcttatgcttctgaataatcaaagactaatttgtgattttactttttaatagatatgactttgcttccaacatggaatgaaataaaaaataaataataaaagattgccatgaatcttgcaaaaaaaaaaa

SEQ ID NO: 334 - DNA, 947 bp, Homo sapiens
  CDS 155..751
  sig_peptide 155..340: Von Heijne matrix score 3.70000004768372 seq SILGIISVPLSIG/YC
  polyA_signal 912..917
  polyA_site 937..947
agtgaaaagaagatgcctagagaatggcaatttaaaagaaaaagatatacttgttttgccccttgacctgaccgacactggttcccatgaagcggctaccaaagctgttctccaggagtttggtagaatcgacattctggtcaacaatggtggaatgtcccagcgttctctgtgcatggataccagcttggatgtctacagaragctaatagagcttaactacttagggacggtgtccttgacaaaatgtgttctgcctcacatgatcgagaggaagcaaggaaagattgttactgtgaatagcatcctgggtatcatatctgtacctctttccattggatactgtgctagcaagcatgctctccggggtttttttaatggccttcgaacagaacttgccacatacccaggtataatagtttctaacatttgcccaggacctgtgcaatcaaatattgtggaaaattccctagctggagaagtcacaaaaactataggcaataatggaaaccagtcccacaagatgacaaccagtcgttgtgtgcggctgatgttaatcagcatggccaatgatttgaaagaagtttggatctcagaacaacctttcttgttagtaacatatttgtggcaatacatgccaacctgggcctggtggataaccaacaagatggggaagaaaaggattgagaactttaagagtggtgtggatgcmractcttcttattttaaaatctttaagacaaaacatgactgaaaagancacctgtacttttcaagccactggagggagaaatggaaaacatgaaaacagcaatcttcttatgcttctgaataatcaaagactaatttgtgattttactttttaatagatatgactttgcttccaacatggrrtgaaataaaaaataaataataaaagattgccatgrrtcttgcaaaaaaaaaaa

SEQ ID NO: 335 - DNA, 621 bp, Homo sapiens
  CDS 46..585
  sig_peptide 46..120: Von Heijne matrix score 6.30000019073486 seq AFSLSVMAALTFG/CF
  polyA_signal 584..589
  polyA_site 606..619
aactgggtgtgcgtrtggagtccggactcgtgggagacgatcgcgatgaacacggtgctgtcgcgggcgaactcactgttcgccttctcgctgagcgtgatggcsgcgctcaccttcggctgcttcatcayyaccgccttcaaagacaggagcgtcccggtgcggctgcacgtctcgcgaatcatgctaaaaaatgtagaagatttcactggacctagagaaagaagtgatctgggatttatcacatttgatataactgctgatctagagaatatatttgattggaatgttaagcagttgtttctttatttatcagcagaatattcaacaaaaaataatgctctgaaccaakttgtcctatgggacaagattgttttgagaggtgataatccgaagctgctgctgaaagatatgaaaacaaaatattttttctttgacgatggaaatggtctcwagggaaacaggaatgtcactttgaccctgtcttggaacgtcgtaccaaatgctggaattctacctcttgtgacaggatcaggacacgtatctgtcccatttccagatacatatgaaataacgaagagttattaaattattctgaatttgaaacaaaaaaaaaaaahm

SEQ ID NO: 336 - DNA, 699 bp, Homo sapiens
  CDS 35..568
  sig_peptide 35..100: Von Heijne matrix score 10.7 seq LLTLALLGGPTWA/GK
  polyA_signal 667..672
  polyA_site 685..699
aaccagacgcccagtcacaggcgagagccctgggatgcaccggccagaggccatgctgctgctgctcacgcttgccctcctggggggccccacctgggcagggaagatgtatggccctggaggaggcaagtatttcagcaccactgaagactacgaccatgaaatcacagggctgcgggtgtctgtaggtcttctcctggtgaaaagtgtccaggtgaaacttggagactcctgggacgtgaaactgggagccttaggtgggaatacccaggaagtcaccctgcagccaggcgaatacatcacaaaagtctttgtcgccttccaaactttcctccggggtatggtcatgtacaccagcaaggaccgctatttctattttgggaagcttgatggccagatctcctctgcctaccccagccaagaggggcaggtgctggtgggcatctatggccagtatcaactccttggcatcaagagcattggctttgaatggaattatccactagaggagccgaccactgagccaccagttaatctcacatactcagcaaactcacccgtgggtcgctagggtggggtatggggccatccgagctgaggccatctgggtggtggtggctgatggtactggagtaactgagtcgggacgctgaatctgaatccaccaataaataaaggttctgcaaaaaaaaaaaaaaa

SEQ ID NO: 337 - DNA, 497 bp, Homo sapiens
  CDS 68..337
  sig_peptide 68..124: Von Heijne matrix score 10 seq LVLLGVSIFLVSA/QN
  polyA_signal 462..467
  polyA_site 482..497
agcgccttgccttctcttaggctttgaagcatttttgtctgtgctccctgatcttcaggtcaccaccatgaagttcttagcagtcctggtactcttgggagtttccatctttctggtctctgcccagaatccgacaacagctgctccagctgacacgtatccagctactggtcctgctgatgatgaagcccctgatgctgaaaccactgctgctgcaaccactgcgaccactgctgctcctaccactgcaaccaccgctgcttctaccactgctcgtaaagacattccagttttacccaaatgggttggggatctcccgaatggtagagtgtgtccctgagatggaatcagcttgagtcttctgcaattggtcacaactattcatgcttcctgtgatttcatccaactacttaccttgcctacgatatcccctttatctctaatcagtttattttctttcaaataaaaaataactatgagcaaaaaaaaaaaaaaaa

SEQ ID NO: 338 - DNA, 598 bp, Homo sapiens
  CDS 39..413
  sig_peptide 39..83: Von Heijne matrix score 4.6 seq LLTHNLLSSHVRG/VG
  polyA_signal 566..571
  polyA_site 583..598
ttttccggttccggcctggcgagagtttgtgcggcgacatgaaactgcttacccacaatctgctgagctcgcatgtgcggggggtggggtcccgtggcttccccctgcgcctccaggccaccgaggtccgtatctgccctgtggaattcaaccccaacttcgtggcgcgtatgatacctaaagtggagtggtcggcgttcctggaggcggccgataacttgcgtctgatccaggtgccgaaagggccggttgagggatatgaggagaatgaggagtttctgaggaccatgcaccacctgctgctggaggtggaagtgatagagggcaccctgcagtgcccggaatctggacgtatgttccccatcagccgcgggatccccaacatgctgctgagtgaagaggaaactgagagttgattgtgccaggcgccagtttttcttgttatgactgtgtatttttgttgatctataccctgtttccgaattctgccgtgtgtatccccaacccttgacccaatgacaccaaacacagtgtttttgagctcggtattatatatttttttctcattaaaggtttaaaaccaaaaaaaaaaaaaaaa

SEQ ID NO: 339 - DNA, 1579 bp, Homo sapiens
  CDS 235..642
  sig_peptide 235..336: Von Heijne matrix score 8.7 seq HLLALLVFSVLLA/LR
  polyA_signal 1540..1545
  polyA_site 1564..1579
gtgggggcatggcgtccgatcgaggcgggcgttcacgggcggccagggttgagtcccgggtcggggccgggggattgccggcgcatcagggccgagggctggggctggcggggccgctcgctgcctctcgctcgcagcagcggcggcaggcgcgggcgagggccacggggagaggagacgcagccccgcgggtggcacgctcggccgggccccggcccgcgctcaacgggcgcgatgctcttctcgctccgggagctggtgcagtggctaggcttcgccaccttcgagatcttcgtgcacctgctggccctgttggtgttctctgtgctgctggcactgcgtgtggatggcctggtcccgggcctctcctggtggaacgtgttcgtgcctttcttcgccgctgacgggctcagcacctacttcaccaccatcgtgtccgtgcgcctcttccaggatggagagaagcggctggcggtgctccgccttttctgggtacttacggtcctgagtctcaagttcgtcttcgagatgctgttgtgccagaagctggcggagcagactcgggagctctggttcggcctcattacgtccccgctcttcattctcctgcagctgctcatgatccgcgcctgtcgggtcaactagcctcaccgaggtgccggagagggagcgctggacaactagaatgttgacctcgagccgaggccctacttgcagcgcaccggaggagaggctctctagtctgaaggcaccgccggcttgcgccgagctgagtgccgggtttccctattccaatcctgtttgaaatggtttcttcagcagggcttaaaagagcagccttcatcctgaaaatgtatttccttttgtttaatgctttgagtagataatcctgaattgaggtcatgaggaggccccccaggccagacagtcctgaacccctctgacacttggaaactgaatataagtaaaatgtccaggtggactctgagtatttcctgtggatcctgggaaagtactgttgcacaaaggctgcaaagctggactcaggaatgtcctccaaccagcagcgctaacctaagagctccctgtgccgtctatccagaccagacttcggtagatgcctttgttagatctatcacatgtaaacgagcttgtatctccttccctgtgccacgagagagattggctttttattccagtctaggcagagacagaagaatgttgaataagagcacgattagagtcctgtctggttatctgttgcccaagaaaagaactctgctgtccaggcactgcttggcttactatcccagcaaagactgcagttttgtggacttttgaccaccttgggctggcactcttagcacacctgagacagatttaagcctccctaagagactgaagagaggaacaggtgtcagatactcataggcactgagatctacaaatgggaagcttgtgagtggcccatctttgttggcctacgaactttggtttgatgccagtcaggtgccacatgagaacctttgctgagatgcaaataaagtaagagaatgttttcccaaaaaaaaaaaaaaaa

SEQ ID NO: 340 - DNA, 893 bp, Homo sapiens
  CDS 42..755
  sig_peptide 42..200: Von Heijne matrix score 5.8 seq ILSLQVLLTTVTS/TV
  polyA_signal 860..865
  polyA_site 878..893
gcggttagtggaccgggaccggtaggggtgctgttgccatcatggctgaccccgacccccggtaccctcgctcctcgatcgaggacgacttcaactatggcagcagcgtggcctccgccaccgtgcacatccgaatggcctttctgagaaaagtctacagcattctttctctgcaggttctcttaactacagtgacttcaacagtttttttatactttgagtctgtacggacatttgtacatgagagtcctgccttaattttgctgtttgccctcggatctctgggtttgatttttgcgttgattttaaacagacataagtatccccttaacctgtacctactttttggatttacgctgttggaagctctgactgtggcagttgttgttactttctatgatgtatatattattctgcaagctttcatactgactactacagtattttttggtttgactgtgtatactctacaatctaagaaggatttcagcaaatttggagcagggctgtttgctcttttgtggatattgtgcctgtcaggattcttgaagttttttttatatagtgagataatggagttggtcttagccgctgcaggagcccttcttttctgtggattcatcatctatgacacacactcactgatgcataaactgtcacctgaagagtacgtattagctgccatcagcctctacttggatatcatcaatctattcctgcacctgttacggtttctggaagcagttaataaaaagtaattaaaagtatctcagctcaactgaagaacaacaaaaaaaatttaacgagaaaaaaggattaaagtaattggaagcagtatatagaaactgtttcattaagtaataaagtttgaaccaataaaaaaaaaaaaaaaa

SEQ ID NO: 341 - DNA, 644 bp, Homo sapiens
  CDS 23..340
  sig_peptide 23..235: Von Heijne matrix score 3.9 seq VAVYCSFISFANS/RS
  polyA_signal 611..616
  polyA_site 629..644
gtgatctggccttcgactcgctatgtccactaacaatatgtcggacccacggaggccgaacaaagtgctgaggtacaagcccccgccgagcgaatgtaacccggccttggacgacccgacgccggactacatgaacctgctgggcatgatcttcagcatgtgcggcctcatgcttaagctgaagtggtgtgcttgggtcgctgtctactgctccttcatcagctttgccaactctcggagctcggaggacacgaagcaaatgatgagtagcttcatgctgtccatctctgccgtggtgatgtcctatctgcagaatcctcagcccatgacgcccccatggtgataccagcctagaagggtcacattttggaccctgtctatccactaggcctgggctttggctgctaaacctgctgccttcagctgccatcctggacttccctgaatgaggccgtctcggtgcccccagctggatagagggaacctggccctttcctagggaacaccctaggcttacccctcctgcctcccttcccctgcctgctgctgggggagatgctgtccatgtttctaggggtattcatttgctttctcgttgaaacctgttgttaataaagtttttcactctaaaaaaaaaaaaaaaa

SEQ ID NO: 342 - DNA, 538 bp, Homo sapiens
  CDS 12..380
  sig_peptide 12..263: Von Heijne matrix score 6.2 seq GLFRAAWLPGSRP/SP
  polyA_site 523..538
ctgaattccttatgtccggtgggccagaagcccgtcctcctatgctggtggaaggcggaggaccggagtccctgcagaaggccccgtgcactcgggggcctccctcacatcccgtgccccctgcgctggccttcacagtaggtaatggctccggcccgggtgttcgctgtccacggaacatggcagaggggcaccccggcccggaaagacgccagagccagcaggggctgtttcgggccgcgtggctccccgggtctcggccgtctcccctcttctgcgtctgttccgtgacttcgcctgggtgggatgtaccgcaggtgcatcgcgtcgaggtggggcacggccgccggcaagaaacccaccctgtccggaggcgggcgtgagacaagcccagcccgcacgcgctcatctttcttcgttttttgatcagtttattcagaattgctctataatttaccaattgtatgtatttaacctattcttgtggaaaaaaaaggtctttcattatatctttatttctgcaaaaaaaaaaaaaaaa

SEQ ID NO: 343 - DNA, 752 bp, Homo sapiens
  CDS 8..232
  sig_peptide 8..154: Von Heijne matrix score 4.7 seq DTFLLSFLSTTWL/KT
  polyA_site 737..752
gggggtgatgccgcgcggtcgcaggcttgggatggtgttcgcgcctccgagacccggacagaggcaagcaggggcgccgtgggtgccagagaggcggaagaggaggcctgatggggataccttcctgctgtccttcctgagcacaacctggctgaaaacctggaggtcacaacagtacaaagaatcaaagtcaagatcttgtgccagagagcaaatgaactcttcctcttgctgagaaaacccaccctgctcacctaaaccctggccttgcctggtaattccatccatgcgcctggaaggccccagacatcaaggctctgaggggccaggcacggggagaacccagcagtgccctgccctgcagtctgagctaccagattccttgtgaagataatttgaggaccatgactcacccaaccacatttcctggggcctcaaattgaaaattcaggatgggcttttctatatgactggctgatatccaactatgccatggtctttacatgccatgaacattctttcctgccagagttctaagaatctgtgttctctgccttagaccttctgcagatgagcccacaggaagctccacgtgtagctgagctacatgcaccaggcctcagtttgccccaagtcccctgtgtactctctcatggcctgtggccaagaaatgtattctctcactttggacttaggagtccaaagagaagcccagaaacaaaattgcttgaacttgaaaaaaaaaaaaaaaa

SEQ ID NO: 344 - DNA, 537 bp, Homo sapiens
  CDS 183..422
  sig_peptide 183..302: Von Heijne matrix score 5.8 seq VLFALFVAFLLRG/KL
  polyA_signal 505..510
  polyA_site 523..537
agtatctcaccatttctttctctttctgaaccacattgggtgccaacagaacttgctctctgttctctttcaaaattaccaacatggaccccacccaattcttcccttggaactaaggaacgcctgactgatcatctgatacagcagttcctgagcagaacaaaacaacaaaaacaggacagatggatggaatacccatgtcaatgaagaatgaaatgcccatctcccaactactgatgatcatcgccccctccttgggatttgtgctcttcgcattgtttgtggcgtttctcctgagagggaaactcatggaaacctattgttcgcagaaacacacaaggctagactacattggagatagtaaaaatgtcctcaatgacgtgcagcatggaagggaagacgaagacggcctttttaccctctaacaacgcagtagcatgttagattgaggatgggggcatgacactccagtgtcaaaataagtcttagtagatttccttgtttcataaaaaagactcactcaaaaaaaaaaaaaaa

SEQ ID NO: 345 - DNA, 1602 bp, Homo sapiens
  CDS 24..1004
  sig_peptide 24..170: Von Heijne matrix score 5.6 seq ACLSLGFFSLLWL/QL
  polyA_site 1586..1602
atgcgccgccgcctctccgcacgatgttcccctcgcggaggaaagcggcgcagctgccctgggaggacggcaggtccgggttgctctccggcggcctccctcggaagtgttccgtcttccacctgttcgtggcctgcctctcgctgggcttcttctccctactctggctgcagctcagctgctctggggacgtggcccgggcagtcaggggacaagggcaggagacctcgggccctccccgtgcctgccccccagagccgccccctgagcactgggaagaagacgcatcctggggcccccaccgcctggcagtgctggtgcccttccgcgaacgcttcgaggagctcctggtcttcgtgccccacatgcgccgcttcctgagcaggaagaagatccggcaccacatctacgtgctcaaccaggtggaccacttcaggttcaaccgggcagcgctcatcaacgtgggcttcctggagagcagcaacagcacggactacattgccatgcacgacgttgacctgctccctctcaacgaggagctggactatggctttcctgaggctgggcccttccacgtggcctccccggagctccaccctctctaccactacaagacctatgtcggcggcatcctgctgctctccaagcagcactaccggctgtgcaatgggatgtccaaccgcttctggggctggggccgcgaggacgacgagttctaccggcgcattaagggagctgggctccagcttttccgcccctcgggaatcacaactgggtacaagacatttcgccacctgcatgacccagcctggcggaagagggaccagaagcgcatcgcagctcaaaaacaggagcagttcaaggtggacagggagggaggcctgaacactgtgaagtaccatgtggcttcccgcactgccctgtctgtgggcggggccccctgcactgtcctcaacatcatgttggactgtgacaagaccgccacaccctggtgcacattcagctgagctggatggacagtgaggaagcctgtacctacaggccatattgctcaggctcaggacaaggcctcaggtcgtgggcccagctctgacaggatgtggagtggccaggaccaagacagcaagctacgcaattgcagccacccggccgccaaggcaggcttgggctgggccaggacacgtggggtgcctgggacgctgcttgccatgcacagtgatcagagagaggctggggtgtgtcctgtccgggaccccccctgccttcctgctcaccctactctgacctccttcacgtgcccaggcctgtgggtagtggggagggctgaacaggacaacctctcatcacccccacttttgttccttcctgctgggctgcctcgtgcagagacacagtgtaggggccatgcagctggcgtaggtggcagttgggcctggtgagggttaggacttcagaaaccagagcacaagccccacagagggggaacagccagcaccgctctagctggttgttgccatgccggaatgtgggcctagtgttgccagatcttctgatttttcgaaagaaactagaatgctggattctcaaaaaaaaaaaaaaaaa

SEQ ID NO: 346 - DNA, 948 bp, Homo sapiens
  CDS 80..784
  sig_peptide 80..139: Von Heijne matrix score 4 seq LLKVVFVVFASLC/AW
  polyA_signal 910..915
  polyA_site 933..948
cttcctgacccaggggctccgctggctgcggtcgcctgggagctgccgccagggccaggaggggagcggcacctggaagatgcgcccattggctggtggcctgctcaaggtggtgttcgtggtcttcgcctccttgtgtgcctggtattcggggtacctgctcgcagagctcattccagatgcacccctgtccagtgctgcctatagcatccgcagcatcggggagaggcctgtcctcaaagctccagtccccaaaaggcaaaaatgtgaccactggactccctgcccatctgacacctatgcctacaggttactcagcggaggtggcagaagcaagtacgccaaaatctgctttgaggataacctacttatgggagaacagctgggaaatgttgccagaggaataaacattgccattgtcaactatgtaactgggaatgtgacagcaacacgatgttttgatatgtatgaaggcgataactctggaccgatgacaaagtttattcagagtgctgctccaaaatccctgctcttcatggtgacctatgacgacggaagcacaagactgaataacgatgccaagaatgccatagaagcacttggaagtaaagaaatcaggaacatgaaattcaggtctagctgggtatttattgcagcaaaaggcttggaactcccttccgaaattcagagagaaaagatcaaccactctgatgctaagaacaacagatattctggctggcctgcagagatccagatagaaggctgcatacccaaagaacgaagctgacactgcagggtcctgagtaaatgtgttctgtataaacaaatgcagctggaatcgctcaagaatcttatttttctaaatccaacagcccatatttgatgagtattttgggtttgttgtaaaccaatgaacatttgctagttgtaccaaaaaaaaaaaaaaaa

SEQ ID NO: 347 - DNA, 687 bp, Homo sapiens
  CDS 67..222
  sig_peptide 67..159: Von Heijne matrix score 5.8 seq VLFSASSFPSISG/NI
  polyA_site 673..687
tacaattggaaaatctttatacattgaaaaaagcaacttttcctccccctctcaataggtacaagaatgcgggtttataaaaggacacagttgaggcaagagaccggacccaaaagttatgtgctctttagtgcctcaagttttccaagcatctctggtaacataaggagtagaaattattttcaaaaacaaaataatcactggttccagaccagtgattattaaccctttttgaattatgaacccctttaaaacctaatgaaatttaaggaccctctcccccaaaatatacatataaaaaaacaaggcagtctatggacctactgagtaactctcaagatagtaagtaaggagagaaagatctatgtttccctctttgataagtatgaaatatttggaggagatgctaatttttgcacgtttatgatatttgcaatctttcatttttgtagcagattatactcaaaaatttgatccagaacttggcccctattcttttatcagcactttaacttgtaaactgaaaagtttaccatcatctgtatgacatcctaatgaggttaaaaagataaaatgcagttatgattatgataggtataactgtatccaggtttccacagcaaaaacaaaacaaaacatacaccatgttctggggttattgacagcctcctcaaaaaaaaaaaaaaa

SEQ ID NO: 348 - DNA, 821 bp, Homo sapiens
  CDS 46..732
  sig_peptide 46..186: Von Heijne matrix score 9.4 seq LILLILCVGMVVG/LV
  polyA_signal 781..786
  polyA_site 806..821
gcaaagtcattgaactctgagctcagttgcagtactcgggaagccatgcaggatgaagatggatacatcaccttaaatattaaaactcggaaaccagctctcgtctccgttggccctgcatcctccttctggtggcgtgtgatggctttgattctgctgatcctgtgcgtggggatggttgtcgggctggtggctctggggatttggtctgtcatgcagcgcaattacctacaagatgagaatgaaaatcgcacaggaactctgcaacaattagcaaagcgcttctgtcaatatgtggtaaaacaatcagaactaaagggcactttcaaaggtcataaatgcagcccctgtgacacaaactggagatattatggagatagctgctatgggttcttcaggcacaacttaacatgggaagagagtaagcagtactgcactgacatgaatgctactctcctgaagattgacaaccggaacattgtggagtacatcaaagccaggactcatttaattcgttgggtcggattatctcgccagaagtcgaatgaggtctggaagtgggaggatggctcggttatctcagaaaatatgtttgagtttttggaagatggaaaaggaaatatgaattgtgcttattttcataatgggaaaatgcaccctaccttctgtgagaacaaacattatttaatgtgtgagaggaaggctggcatgaccaaggtggaccaactaccttaatgcaaagaggtggacaggataacacagataagggctttattgtacaataaaagatatgtatgaatgcaacaaaaaaaaaaaaaaaa

SEQ ID NO: 349 - DNA, 445 bp, Homo sapiens
  CDS 81..356
  sig_peptide 81..152: Von Heijne matrix score 6.2 seq AILGSTWVALTTG/AL
  polyA_signal 406..411
  polyA_site 429..445
  misc_feature 1: n=a, g, c or t
ngaaaaaaaacatccgggccgcgcggggaaggggagacgtggggtagaggggagcattgcttccttctctcgcagtgaccatgacgaaattagcgcagtggctttggggactagcgatcctgggctccacctgggtggccctgaccacgggagccttgggcctggagctgcccttgtcctgccaggaagtcctgtggccactgcccgcctacttgctggtgtccgccggctgctatgccctgggcactgtgggctatcgtgtggccacttttcatgactgcgaggacgccgcacgcgagctgcagagccagatacaggaggcccgagccgacttagcccgcagggggctgcgcttctgacagcctaaccccattcctgtgcggacagcccttcctcccatttcccattaaagagccagtttattttctaaaaaaaaaaaaaaaaa

SEQ ID NO: 350 - DNA, 1517 bp, Homo sapiens
  CDS 72..1346
  sig_peptide 72..140: Von Heijne matrix score 5.9 seq SCDCFVSVPPASA/IP
  polyA_signal 1482..1487
  polyA_site 1502..1517
atggggcggccctggccagaagcggaggaggtggcacccgggaccgagctggggtcttggaggaagagaggatggcgtcgtcgagccctgactccccatgttcctgcgactgctttgtctccgtgcccccggcctcagccatcccggctgtgatctttgccaagaactcggaccgaccccgggacgaggtgcaggaggtggtgtttgtccccgcaggcactcacactcctgggagccggctccagtgcacctacattgaagtggaacaggtgtcgaagacgcacgctgtgattctgagccgtccttcttggctatggggggctgagatgggcgccaacgagcatggtgtctgcattggcaacgaggctgtgtggacgaaggagccagttggggagggggaagccctgctgggcatggacctactcaggctggctttggaacggagcagctctgcccaggaggccttgcatgtgatcacagggttactggagcactatgggcaggggggcaactgcctggaggatgctgcgccattctcctaccatagcaccttcctgctggctgaccgcactgaggcgtgggtgctggagacagctgggaggctctgggctgcacagaggatccaggagggggcccgcaacatctccaaccagctgagcattggcacggacatctcggcccaacacccggagctgcggactcatgcccaggccaagggctggtgggatgggcagggtgcctttgactttgctcagatcttctccctgacccagcagcctgtgcgcatggaggctgccaaggcccgcttccaggcagggcgggagctgctgcggcaacggcaagggggcatcacggcagaggtgatgatgggcatcctcagagacaaggagagtggtatctgtatggactcgggaggctttcgcaccacggccagcatggtgtctgtcctgccccaggatcccacgcagccctgcgtgcactttcttaccgccacgccagacccatccaggtctgtgttcaaacctttcatcttcggggtgggggtggcccaggccccccaggtgctgtcccccacttttggagcacaagaccctgttcggaccctgccccgattccagactcaggtagatcgtcggcataccctctaccgtggacaccaggcagccctggggctgatggagagagatcaggatcgggggcagcagctccagcagaaacagcaggatctggagcaggaaggcctcgaggccacacaggggctgctggccggcgagtgggccccacccctctgggagctgggcagcctcttccaggccttcgtgaagagggagagccaggcttatgcgtaagcttcatagcttctgctggcctggggtggacccaggacccctggggcctgggtgccctgagtggtggtaaagtggagcaatcccttcacgctccttggccatgttctgagcggccagcttggcctttgccttaataaatgtgctttattttcaaaaaaaaaaaaaaaa

SEQ ID NO: 351 - DNA, 1560 bp, Homo sapiens
  CDS 194..454
  sig_peptide 194..379: Von Heijne matrix score 4.6 seq HILTVPLLEPARC/SG
  polyA_site 1545..1560
cattcataaatattctcttaccattttacttgacaattattttaggcttacagaaaagtggccagagtagtgcagggctcctatagttggcttcccctgttgccatcatctcgtctgatcgtagggcaggttagcattgctacaggcctcttacccggcctacagctcttaggcacatctgtccatttgactaatggccattttctggatagtccatgctcacttctggagccccctcccacccaggctcccacatggccggtgctgttgcctgaaggcccctcttcctcctgacgtgggaccccttcaggtagccccgcatcttttcagcgtgccccttcacattctgactgttcctcttctggaacctgcaagatgctctgggatccttgtatttttcctgcaccagcccgtttcatccctgagcttctgttattttattggaggatggtgctagaaacacaggtctggatgcaggcaggagacacacgcgtccacactagcatgcgtgtgtacacacatctacatgtgcttatcccccgcgttcatgttaaaaaccatgggatcataccggtgtttcagattcacatccaccccagcagggtttctcgcccccattgcttataaccttagcaggtgttgagaaccctggcgctcactgtccacagtgagtttgcttattcgttgaaacctagcgtgcctgtagagtgtggagagttgccggcccgcacccctgcgagacacagactttctgaccgcagccctcatgtgtgtggctcttcttgtccttggccttacagtgcagtcggatcgctgctttccagagttgcctgggggtaggtccctcctcttctgtgctctgcggcgcagtgagcggcctttgcctcaggcctcccgcggcttccttaagcctctggcctgcccggtccctggcgccaggtctgttttccctgctcccttctctctgatcctgctttggtctgagccgtgcctctgggccccagcattgctgggccgcattgtcgttttatttctcttgtgtcgttgcgtctagtgtaagacattcagtggatcattgtggatggtcattagtggtccagagtggaaagtgaggtcgttgttggtggtgtacctacagtgcctgttagggagctgttcctggtgttgcccgtgaatattagacttgctcccgagcctgcgccacagcccatccctagcgacttagcgacagtggctgccaggtgcgggtggctgtgtcttgtatacactgtgtgggcagcccagggccaggggcctcctccttccatggcagcctctgtctgcatcacagagataaggccgcggctgccaccaggataaggagccagcagctgctctcggaggagccgccctgacccctccccatcatgccgccgtggggtttccatgcagaattttccttgggcagagttgctttttgattctagtttttaaaaaaactgttctttccatcatgataaaaagaaagacatgctcatttcaaatagtttaggagatgtggaagcaaaaaaaaaaaaaaaa

SEQ ID NO: 352 - DNA, 1066 bp, Homo sapiens
  CDS 48..494
  sig_peptide 48..347: Von Heijne matrix score 3.7 seq LASSFLFTMGGLG/FI
  polyA_signal 1031..1036
  polyA_site 1051..1066
gaggcgcgtggggcttgaggccgagaacggcccttgctgccaccaacatggagactttgtaccgtgtcccgttcttagtgctcgaatgtcccaacctgaagctgaagaagccgccctggttgcacatgccgtcggccatgactgtgtatgctctggtggtggtgtcttacttcctcatcaccggaggaataatttatgatgttattgttgaacctccaagtgtcggttctatgactgatgaacatgggcatcagaggccagtagctttcttggcctacagagtaaatggacaatatattatggaaggacttgcatccagcttcctatttacaatgggaggtttaggtttcataatcctggaccgatcgaatgcaccaaatatcccaaaactcaatagattccttcttctgttcattggattcgtctgtgtcctattgagttttttcatggctagagtattcatgagaatgaaactgccgggctatctgatgggttagagtgcctttgagaagaaatcagtggatactggatttgctcctgtcaatgaagttttaaaggctgtaccaatcctctaatatgaaatgtggaaaagaatgaagagcagcagtaaaagaaatatctagtgaaaaaacaggaagcgtattgaagcttggactagaatttcttcttggtattaaagagacaagtttatcacagaattttttttcctgctggcctattgctataccaatgatgttgagtggcattttctttttagtttttcattaaaatatattccatatctacaactataatatcaaataaagtgattattttttacaaccctcttaacattttttggagatgacatttctgattttcagaaattaacataaaatccagaagcaagattccgtaagctgagaactctggacagttgatcagctttacctatggtgctttgcctttaactagagtgtgtgatggtagattatttcagatatgtatgtaaaactgtttcctgaacaataagatgtatgaacggagcagaaataaatactttttctaattaaaaaaaaaaaaaaaa

SEQ ID NO: 353 - DNA, 1061 bp, Homo sapiens
  CDS 111..671
  sig_peptide 111..215: Von Heijne matrix score 4.5 seq SFTVSMAIGLVLG/GF
  polyA_signal 990..995
  polyA_site 1045..1061
attatttttctcttgctgtactacaaagagatagaatcaaactgctttttttcgacatactggtttttctttctgtttttcttctctttcttctatttcttgtggatattatggctaataacacaacaagtttagggagtccatggccagaaaacttttgggaggaccttatcatgtccttcactgtatccatggcaatcgggctggtacttggaggatttatttgggctgtgttcatttgtctgtctcgaagaagaagagccagtgctcccatctcacagtggagttcaagcaggagatctaggtcttcttacacccacggcctcaacagaactggattttaccgccacagtggctgtgaacgtcgaagcaacctcagcctggccagtctcaccttccagcgacaagcttccctggaacaagcaaattcctttccaagaaaatcaagtttcagagcttctactttccatccctttctgcaatgtccaccacttcctgtggaaactgagagtcagctggtgactctcccttcttccaatatctctcccaccatcagcacttcccacagtctgagccgtcctgactactggtccagtaacagtcttcgagtgggcctttcaacaccgcccccacctgcctatgagtccatcatcaaggcattcccagattcctgagtagggtggcttttggtttttgtttctttcttgtcttgtcttttattgaaaggaaatcaaaaataggctaaacagaattttgagggcatggcccaaataactcatgagttccaagttgaaacatggttgtgcaagttggacattacaatgtaaaacacattttcttcaaacacgttttcccttttgtttcaaaaaatgtaatattttcccccaagcgttttatatttatgtattttgtattcaatgtgaggcttattaaaaatagtgattctaatgtaagaatcagctaagatgcattatatatattttaattaaaattaaaacttcagatatttgtggattacaatcctcatttacttccaatgtgactaaaaaaaaaaaaaaaaa

SEQ ID NO: 354 - DNA, 2025 bp, Homo sapiens
  CDS 5..373
  sig_peptide 5..82: Von Heijne matrix score 4 seq SLFWFTVITLSFG/YY
  polyA_signal 1986..1991
  polyA_site 2010..2025
agccatggctacggcagccggcgcgacctactttcagcgaggcagtctgttctggttcacagtcatcaccctcagctttggctactacacatgggttgtcttctggcctcagagtatcccttatcagaaccttgggcccctgggccccttcactcagtacttggtggaccaccatcacaccctcctgtgcaatgggtattggcttgcctggctgattcatgtgggagagtccttgtatgccatagtattgtgcaagcataaaggcatcacaagtggtcgggctcagctactctggttcctacagactttcttctttgggatagcgtctctcaccatcttgattgcttacaaacggaagcgccaaaaacaaacttgaagttgtctgaaagcttgctctacacttttacattcatcctcacccttttttttgtggggtagaggaggtgcagtaatttactcagtgatctttctactttctagaaactgtccttcaaagctctttaagaccccctcgttagtcagttttttctcttatatgctctggttgagcttgaatagaccagttgttacttaagaaagaaacagagaaagattttagcttttcaatcctatttggcagaggacttcagctaccttcttacagtctttggctgtgttggtaccctcgtgtgctctgagctaagccacatactaaactgactttttggtttgtatacccttgctcccgccttctgatgaaaacaccttaccctcacaaccaccatctttcctctcctttccaaagctctttccaccttgctgcactaagataaagtgacacttccactatatgtcaattccacacacatttattaggtacctgtgaggtaggatcctatcctctcaaacttccatttctcatgctacagagaaagataaggaagatgagcaagtgcctggaatggggcaggctgagcagtcacacaggcatagaggcacgctgagaacctggaggggagactgcagagtgccttccctgatgctgcagccggaagtgatccttccctccacctggcccctgggacactgtgctctgcagtgtgcagggcctgatggcactgctagattgctccttcagctcagggccacagcttaaacagctttacctttcccctcagcacctgtcccactatcttgcacacaggtgctctaaccatgtttattgaacaaaggagggaaactgatttcactttcacttgttcattatcattccaatttttatgtgaaaatggcacaacccatttggggtaccctcaccccaaaataaaagcccaagtctacctttgactggtaccaccttttttgtggtttcgttggtgagaaacctttatctttttcatacctttctattctcaatcacttctccaaaagtgtgtctttccagctctgatttattcaaaacacaagcatttctgtttagagattctagcccatgggttatctggctagttattacctctcctgttcacttagttatactttattattgctcacaggctggggaggcagaatgactctgtcaccactaggagccattagggcttcttccctggaggactgcctgcttgctttctggggacactagccctcatttcccttctgtggtacagtggggcaaattatttgtattaagcaaacatttatgggaaacaacccgctcccgaaaacggagcccccaagtaaagcacaaccctgaaagattatgaactatgaattgtctctggtagagataaatttctgcaaacatatctcagtcttccctctgtttctctggtgattaagaagttcctttttggtaaggaaaaggatttttaaccatagagttaggcatcatggaaattcaaaccagatttcttaatacctggtcttcctcaaagagaaataataacagtaatagtggtgctgggaacaatatggcagattattgaatgaaattgattaacttgaataaaatgctgtgaattttctctaaaaaaaaaaaaaaaa

SEQ ID NO: 355 - DNA, 591 bp, Homo sapiens
  CDS 14..472
  sig_peptide 14..319: Von Heijne matrix score 4.9 seq VFFFGVSIILVLG/ST
  polyA_signal 555..560
  polyA_site 576..591
agcaccatctgtcatggcggctgggctgtttggtttgagcgctcgccgtcttttggcggcagcggcgacgcgagggctcccggccgcccgcgtccgctgggaatctagcttctccaggactgtggtcgccccgtccgctgtggcgggaaagcggcccccagaaccgaccacaccgtggcaagaggacccagaacccgaggacgaaaacttgtatgagaagaacccagactcccatggttatgacaaggaccccgttttggacgtctggaacatgcgacttgtcttcttctttggcgtctccatcatcctggtccttggcagcacctttgtggcctatctgcctgactacaggatgaaagagtggtcccgccgcgaagctgagaggcttgtgaaataccgagaggccaatggccttcccatcatggaatccaactgcttcgaccccagcaagatccagctgccagaggatgagtgaccagttgctaagtggggctcaagaagcaccgccttccccaccacctgcctgccattctgacctcttctcagagcacctaattaaaggggctgaaagtctgaaaaaaaaaaaaaaaa

SEQ ID NO: 356 - DNA, 544 bp, Homo sapiens
  CDS 2..217
  polyA_signal 489..494
  polyA_site 529..544
tctacctgtgagtactaggatcatcaatcatatctacagcttcccctcagttgatttatggatagtttgtattttcactgtatctgtctcacacctttttgaaaagggaacattgtatggctacttttatgtgattaactcctccatcaatttatgtgtcaatgattgccttcctgtaatggattcaatttctctgtctccattgtttctttctcactagagaagttctttaaaattctatgaaaatgaaactgtgctaaattaaaaatctactcatgataacaggagacactcaaaattatgggtttcagtttcaggcttctcaccatgtcctcagattgtactccctttctagcccttctgcagcaaataaacctttgccatcagttcaccaaaagcactcatgagaggaaaaatggcatatcactaaatatagagttctttgtcacttcttgatttcaaatttacaactaatactcaacactttaattaaatctttcttttctcttcttcctaaaacatacatgcaaaaaaaaaaaaaaaa

SEQ ID NO: 357 - DNA, 1689 bp, Homo sapiens
  CDS 51..575
  sig_peptide 51..110: Von Heijne matrix score 11.2 seq AFLLLVALSYTLA/RD
  polyA_signal 1653..1658
  polyA_site 1674..1689
agaagcttggaccgcatcctagccgccgactcacacaaggcagagttgccatggagaaaattccagtgtcagcattcttgctccttgtggccctctcctacactctggccagagataccacagtcaaacctggagccaaaaaggacacaaaggactctcgacccaaactgccccagaccctctccagaggttggggtgaccaactcatctggactcagacatatgaagaagctctatataaatccaagacaagcaacaaacccttgatgattattcatcacttggatgagtgcccacacagtcaagctttaaagaaagtgtttgctgaaaataaagaaatccagaaattggcagagcagtttgtcctcctcaatctggtttatgaaacaactgacaaacacctttctcctgatggccagtatgtccccaggattatgtttgttgacccatctctgacagttagagccgatatcactggaagatattcaaatcgtctctatgcttacgaacctgcagatacagctctgttgcttgacaacatgaagaaagctctcaagttgctgaagactgaattgtaaagaaaaaaaatctccaagcccttctgtctgtcaggccttgagacttgaaaccagaagaagtgtgagaagactggctagtgtggaagcatagtgaacacactgattaggttatggtttaatgttacaacaactattttttaagaaaaacaagttttagaaatttggtttcaagtgtacatgtgtgaaaacaatattgtatactaccatagtgagccatgattttctaaaaaaaaaataaatgttttgggggtgttctgttttctccaacttggtctttcacagtggttcgtttaccaaataggattaaacacacacaaaatgctcaaggaagggacaagacaaaaccaaaactagttcaaatgatgaagaccaaagaccaagttatcatctcaccacaccacaggttctcactagatgactgtaagtagacacgagcttaatcaacagaagtatcaagccatgtgctttagcataaaagaatatttagaaaaacatcccaagaaaatcacatcactacctagagtcaactctggccaggaactctaaggtacacactttcatttagtaattaaattttagtcagattttgcccaacctaatgctctcagggaaagcctctggcaagtagctttctccttcagaggtctaatttagtagaaaggtcatccaaagaacatctgcactcctgaacacaccctgaagaaatcctgggaattgaccttgtaatcgatttgtctgtcaaggtcctaaagtactggagtgaaataaattcagccaacatgtgactaattggaagaagagcaaagggtggtgacgtgttgatgaggcagatggagatcagaggttactagggtttaggaaacgtgaaaggctgtggcatcagggtaggggagcattctgcctaacagaaattagaattgtgtgttaatgtcttcactctatacttaatctcacattcattaatatatggaattcctctactgcccagcccctactgatttctttggcccctggactatggtgctgtatataatgctttgcagtatctgttgcttgtcttgattaacttttttggataaaaccttttttgaacagaaaaaaaaaaaaaaaa

SEQ ID NO: 358 - DNA, 1111 bp, Homo sapiens
  CDS 69..977
  sig_peptide 69..128: Von Heijne matrix score 5.3 seq VLLGSGLTILSQP/LM
  polyA_signal 1076..1081
  polyA_site 1096..1111
acctaggaccggctcaccgggtcgcttggtggctccgtctgtctgtccgtccgcccgcgggtgccatcatggcggacgcggccagtcaggtgctcctgggctccggtctcaccatcctgtcccagccgctcatgtacgtgaaagtgctcatccaggtgggatatgagcctcttcctccaacaataggacgaaatatttttgggcggcaagtgtgtcagcttcctggtctctttagttatgctcagcacattgccagtatcgatgggaggcgcgggttgttcacaggcttaactccaagactgtgttcgggagtccttggaactgtggtccatggtaaagttttacagcattaccaggagagtgacaagggtgaggagttaggacctggaaatgtacagaaagaagtctcatcttcctttgaccacgttatcaaggagacaactcgagagatgatcgctcgttctgctgctaccctcatcacacatcccttccatgtgatcactctgagatctatggtacagttcattggcagagaatccaagtactgtggactttgtgattccataataaccatctatcgggaagagggcattctaggatttttcgcgggtcttgttcctcgccttctaggtgacatcctttctttgtggctgtgtaactcactggcctacctcgtcaatacctatgcactggacagtggggtttctaccatgaatgaaatgaagagttattctcaagctgtcacaggattttttgcgagtatgttgacctatccctttgtgcttgtctccaatcttatggctgtcaacaactgtggtcttgctggtggatgccctccttactccccaatatatacgtcttggatagactgttggtgcatgctacaaaaagaggggaatatgagccgaggaaatagcttatttttccggaaggtcccctttgggaagacttattgttgtgacctgaaaatgttaatttgaagatgtggggcagggacagtgacatttctgtagtcccagatgcacagaattatgggagagaatgttgatttctatacagtgtggcgcgcttttttaataatcatttaatcttggcaaaaaaaaaaaaaaaa

SEQ ID NO: 359 - DNA, 554 bp, Homo sapiens
  CDS 44..238
  sig_peptide 44..160: Von Heijne matrix score 3.9 seq FKTIAFLLLYVSA/GP
  polyA_signal 443..448
  polyA_site 540..554
atcctcaacagaataattgctgacaaactctcttgcccagaaaatgtctactggaattatggagtacaaaaaaactacaaaagcaatgaaaaaaaagaaggatgttttatttacatcctatttcaaaaccattgctttcttgctattgtatgtctctgcaggcccaatatcgcgaatcttcataagaagtttagaattgttccttatgtttccttctaacaaacactggtatatttcatgaaagtgtatattttattcacttccaaaacagttagctcataattcagaacattgaggtttgcaaaatgactgaaggaaactttacctaaacaatagttgccagttctgctgagaattatcacgggcccacaacggctgtgtgtttttccatacagatattctaatttttttattatgcagctaatttttttttagactcgcgaataaaatagcaagtcagtctgtgcataagcatatgtttaaatctaccaggagaaatgtctggaatctttttggttattaaaattaaaattcaggataaaaaaaaaaaaaaa

SEQ ID NO: 360 - DNA, 1773 bp, Homo sapiens
  CDS 114..524
  sig_peptide 114..164: Von Heijne matrix score 5.2 seq ATLAVGLTIFVLS/VV
  polyA_signal 1739..1744
  polyA_site 1758..1773
gatttgctttctttttctccaaaaggggaggaaattgaaactgagtggcccacgatgggaagaggggaaagcccaggggtacaggaggcctctgggtgaaggcagaggctaacatggggttcggagcgaccttggccgttggcctgaccatctttgtgctgtctgtcgtcactatcatcatctgcttcacctgctcctgctgctgcctttacaagacgtgccgccgaccacgtccggttgtcaccaccaccacatccaccactgtggtgcatgccccttatcctcagcctccaagtgtgccgcccagctaccctggaccaagctaccagggctaccacaccatgccgcctcagccagggatgccagcagcaccctacccaatgcagtacccaccaccttacccagcccagcccatgggcccaccggcctaccacgagaccctggctggaggagcagccgcgccctaccccgccagccagcctccttacaacccggcctacatggatgccccgaaggcggccctctgagcattccctggcctctctggctgccacttggttatgttgtgtgtgtgcgtgagtggtgtgcaggcgcggttccttacgccccatgtgtgctgtgtgtgtccaggcacggttccttacgccccatgtgtgctgtgtgtgtcctgcctgtatatgtggcttcctctgatgctgacaaggtggggaacaatccttgccagagtgggctgggaccagactttgttctcttcctcacctgaaattatgcttcctaaaatctcaagccaaactcaaagaatggggtggtggggggcaccctgtgaggtggcccctgagaggtgggggcctctccagggcacatctggagttcttctccagcttaccctagggtgaccaagtagggcctgtcacaccagggtggcgcagctttctgtgtgatgcagatgtgtcctggtttcggcagcgtagccagctgctgcttgaggccatggctcgtccccggagttgggggtacccgttgcagagccagggacatgatgcaggcgaagcttgggatctggccaagttggactttgatcctttgggcagatgtcccattgctccctggagcctgtcatgcctgttggggatcaggcagcctcctgatgccagaacacctcaggcagagccctactcagctgtacctgtctgcctggactgtcccctgtccccgcatctcccctgggaccagctggagggccacatgcacacacagcctagctgcccccagggagctctgctgcccttgctggccctgcccttcccacaggtgagcagggctcctgtccaccagcacactcagttctcttccctgcagtgttttcattttattttagccaaacattttgcctgttttctgtttcaaacatgatagttgatatgagactgaaacccctgggttgtggagggaaattggctcagagatggacaacctggcaactgtgagtccctgcttcccgacaccagcctcatggaatatgcaacaactcctgtaccccagtccacggtgttctggcagcagggacacctgggccaatgggccatctggaccaaaggtggggtgtggggccctggatggcagctctggcccagacatgaatacctcgtgttcctcctccctctattactgtttcaccagagctgtcttagctcaaatctgttgtgtttctgagtctagggtctgtacacttgtttataataaatgcaatcgtttgcaaaaaaaaaaaaaaaa

SEQ ID NO: 361 - DNA, 917 bp, Homo sapiens
  CDS 26..487
  sig_peptide 26..64: Von Heijne matrix score 6.4 seq MALLLSVLRVLLG/GF
  polyA_signal 883..888
  polyA_site 901..917
aacccacggtggggggagcgcggccatggcgctcctgctttcggtgctgcgtgtactgctgggcggcttcttcgcgctcgtggggttggccaagctctcggaggagatctcggctccagtttcggagcggatgaatgccctgttcgtgcagtttgctgaggtgttcccgctgaaggtatttggctaccagccagatcccctgaactaccaaatagctgtgggctttctggaactgctggctgggttgctgctggtcatgggcccaccgatgctgcaagagatcagtaacttgttcttgattctgctcatgatgggggctatcttcaccttggcagctctgaaagagtcactaagcacctgtatcccagccattgtctgcctggggttcctgctgctgctgaatgtcggccagctcttagcccagactaagaaggtggtcagacccactaggaagaagactctaagtacattcaaggaatcctggaagtagagcatctctgtctctttatgccatgcagctgtcacagcaggaacatggtagaacacagagtctatcatcttgttaccagtataatatccagggtcagccagtgttgaaagagacattttgtctacctggcactgctttctctttttagctttactactcttttgtgaggagtacatgttatgcatattaacattcctcatatcatatgaaaatacaaaataagcagaaaagaaatttaaatcaaccaaaattctgatgccccaaataaccacttttaatgccttggtgtaagtatacctctgaacttttttctgtgcctttaaacagatatatattttttttaaatgaaaataaaaccatatatcctattttatttcctccttttaaaaccttataaactataacactgcaaaaaaaaaaaaaaaaa

SEQ ID NO: 362 - DNA, 641 bp, Homo sapiens
  CDS 80..388
  sig_peptide 80..187: Von Heijne matrix score 3.6 seq RALSTFLFGSIRG/AA
  polyA_signal 609..614
  polyA_site 627..641
gccagtgcgcagacgcaggggtcggcgccgggtgagagcgtgcggccgggtaagggcgtgtggccggattcaccacaacatggcaaatctttttataaggaaaatggtgaaccctctgctctatctcagtcgtcacacggtgaagcctcgagccctctccacatttctatttggatccattcgaggtgcagcccccgtggctgtggaacccggggcagcagtgcgctcacttctctcacccggcctcctgccccatctgctgcctgcgctggggttcaaaaacaagactgtccttaataagcgctgcaaggactgttacctggtgaagaggcggggtcggtggtacgtctactgtaaaacccatccgaggcacaagcagagacagatgtagaccctttccctccagactcacgcacatactcgtcatcgcatcacttgggagaatggttgtatcttatggaaggaattatcacatcaaggagtcaggggaaagtgactggaagcaaacgccctaaaagttacccatcacgtttcagtgtaaatgagtaactatagaagacattgcgttatcttatttccaaaacgttccaactaaaaaacattttcctattaaaatagaccttccgaaaaaaaaaaaaaaa

SEQ ID NO: 363 - DNA, 854 bp, Homo sapiens
  CDS 186..443
  sig_peptide 186..407: Von Heijne matrix score 3.9 seq ISCTCLLLYLTHC/IL
  polyA_signal 827..832
  polyA_site 839..854
aaatgttaatattagaaagagtctcatagtgcttatgtgacatcattctttgcctaaagcctttgtacctactgtaatgaagctaaactccttggcacaggatataaggctcacgatctggcctggactcattttcactcccatcttcagtcatcccctaactcccccacagtcagtccccaaagatgccatatgctttcacttctccatgcccttgctcatttgtctcattgcctgaaatatccttttatttcaccaaactgctgctcatcctcaaggccctgcctgagtcacctttccttcttgcttcctcccccttgcctcctctccccactaccctaagaaaattcatccctcccccttcattaatatcatgcacatgcttgttattatatttaacacattgtatattaggtatttgttttgcttatccttttatcctatgaaattgtgaacaatttgttgaataattgaataatcacatatcaaaatgtagagaggttatttgtctcttccctgtaggactccattttcaggcagtgtctgctaagaatccccttgacctgggattggaagttgtttctcccactgctgagctcctttatattagctcttcacctctcactcctttgtttcttctcttggcactttacgtctttctacccatttaatttgataaatgtctcatgtcatctttaaaactgaaggtgacacatgtctggtttatctttataactcaaaaatgttgagcttaatgcagaatggagaatagctacttagtaaatttttaaaatacatgctaccatttttaaggggagaagaagacaatatacatgacaaaaaaaaaaaaaaaa

SEQ ID NO: 364 - DNA, 1568 bp, Homo sapiens
  CDS 75..1259
  sig_peptide 75..1004: Von Heijne matrix score 4.4 seq VLILLFSLALIIL/PS
  polyA_signal 1536..1541
  polyA_site 1553..1568
agaaaaggtgtagtgtttggggcggtcaacgggctatgctggcttgacagggctgggctcttcagaacagaagcatggatctcggaatccctgacctgctggacgcgtggctggagcccccagaggatatcttctcgacaggatccgtcctggagctgggactccactgcccccctccagaggttccggtaactaggctacaggaacagggactgcaaggctggaagtccggtggggaccgtggctgtggccttcaagagagtgagcctgaagatttcttgaagcttttcattgatcccaatgaggtgtactgctcagaagcatctcctggcagtgacagtggcatctctgaggactcctgccatccagacagtccccctgcccccagggcaaccagttctcctatgctctatgaggttgtctatgaggcaggggccctggagaggatgcagggggaaactgggccaaatgtaggccttatctccatccagctagatcagtggagcccagcatttatggtgcctgattcctgcatggtcagtgagctgccctttgatgctcatgcccacatcctgcccagagcaggcaccgtagccccagtgccctgtacaaccctgctgccctgtcaaaccctgttcctgaccgatgaggagaagcgtctgctggggcaggaaggggtttccctgccctctcacctgcccctcaccaaggcagaggagagggtcctcaagaaggtcaggaggaaaatccgtaacaagcagtcagctcaggacagtcggcggcggaagaaggagtacattgatgggctggagagcagggtggcagcctgttctgcacagaaccaagaattacagaaaaaagtccaggagctggagaggcacaacatctccttggtagctcagctccgccagctgcagacgctaattgctcaaacttccaacaaagctgcccagaccagcacttgtgttttgattcttcttttttccctggctctcatcatcctgcccagcttcagtccattccagagtcgaccagaagctgggtctgaggattaccagcctcacggagtgacttccagaaatatcctgacccacaaggacgtaacagaaaatctggagacccaagtggtagagtccagactgagggagccacctggagccaaggatgcaaatggctcaacaaggacactgcttgagaagatgggagggaagccaagacccagtgggcgcatccggtccgtgctgcatgcagatgagatgtgagctggaacagaccttcctggcccacttcctgatcacaaggaatcctgggcttccttatggctttcttcccactgggattcctacttaggtgtctgccctcaggggtccaaatcacttcaggacaccccaagagatgtcctttagtctctgcctgaggcctagtctgcatttgtttgcatatatgagagggtacctcaaatacttctgttatgtatctgtgattttatttcttctttgggtatagggttgaggggaaataagttttgagtgagaaataaacgttttagctgaaaaaaaaaaaaaaaa

SEQ ID NO: 365 - DNA, 506 bp, Homo sapiens
  CDS 98..376
  sig_peptide 98..151: Von Heijne matrix score 12.3 seq HILFLLLLPVAAA/QT
  polyA_signal 471..476
  polyA_site 491..506
gacatccgctattgctacttctctgctcccccacagttcctctggacttctctggaccacagtcctctgccagacccctgccagaccccagtccaccatgatccatctgggtcacatcctcttcctgcttttgctcccagtggctgcagctcagacgactccaggagagagatcatcactccctgccttttaccctggcacttcaggctcttgttccggatgtgggtccctctctctgccgctcctggcaggcctcgtggctgctgatgcggtggcatcgctgctcatcgtgggggcggtgttcctgtgcgcacgcccacgccgcagccccgcccaagaatatggcaaagtctacatcaacatgccaggcaggggctgaccctcctgcagcttggacctttgacttctgaccctctcatcctggatggtgtgtggtggcacaggaacccccgccccaacttttggattgtaataaaacaattgaaacaccaaaaaaaaaaaaaaaa

SEQ ID NO: 366 - DNA, 542 bp, Homo sapiens
  CDS 72..254
  sig_peptide 72..134: Von Heijne matrix score 4.2 seq LINLAASRTLSFC/IS
  polyA_signal 506..511
  polyA_site 528..542
gaccttaagaagagctaaacgggctgccacctgtagctgaagagtgccttaacgccgaggcccacggctccatgcgagagatgcctgttccttctctgataaatttggcagcttcacgtaccctaagtttttgcatttctgacaaccacgtgtcctcacctggacccgccaacccatcctgtggcctccaccctcactggcttcgtccacttaaacttttaacgtacacatgtagagagctgaaactccaggggtaacatgggacaggtcctcttgatttaatgaaaacagaagatcaactggaccgggtagcaagaaataaggcttaagaagcactggtttctctgcagaagacagcaagatgccccagggaatgtttgtgaaaaaggatgactggatgggaagcaagctgaagaaaaagaaggaaagaaagagagaaatcagtaaatcaccacacaagaggtggagaagaggacttataaatattgtttctatgacatttgaaaataaatgttttactccatgctaaaaaaaaaaaaaaa

SEQ ID NO: 367 - DNA, 1629 bp, Homo sapiens
  CDS 148..1140
  sig_peptide 148..240: Von Heijne matrix score 10 seq LVLLLVTRSPVNA/CL
  polyA_signal 1590..1595
  polyA_site 1614..1629
gtctgctgccgccattgtgcggcgctggtcccctcagagggttcctgctgctgccggtgccttggaccctccccctcgcttctcgttctactgccccaggagcccggcgggtccgggactcccgtccgtgccggtgcgggcgccggcatgtggctgtgggaggaccagggcggcctcctgggccctttctccttcctgctgctagtgctgctgctggtgacgcggagcccggtcaatgcctgcctcctcaccggcagcctcttcgttctactgcgcgtcttcagctttgagccggtgccctcttgcagggccctgcaggtgctcaagccccgggaccgcatttctgccatcgcccaccgtggcggcagccacgacgcgcccgagaacacgctggcggccattcggcaggcagctaagaatggagcaacaggcgtggagttggacattgagtttacttctgacgggattcctgtcttaatgcacgataacacagtagataggacgactgatgggactgggcgattgtgtgatttgacatttgaacaaattaggaagctgaatcctgcagcaaaccacagactcaggaatgatttccctgatgaaaagatccctaccctaatggaagctgttgcagagtgcctaaaccataacctcacaatcttctttgatgtcaaaggccatgcacacaaggctactgaggctctaaagaaaatgtatatggaatttcctcaactgtataataatagtgtggtctgttctttcttgccagaagttatctacaagatgagacaaacagatcgggatgtaataacagcattaactcacagaccttggagcctaagccatacaggagatgggaaaccacgctatgatactttctggaaacattttatatttgttatgatggacattttgctcgattggagcatgcataatatcttgtggtacctgtgtggaatttcagctttcctcatgcaaaaggattttgtatccccggcctacttgaagaagtggtcagctaaaggaatccaggttgttggttggactgttaatacctttgatgaaaagagttactacgaatcccatcttggttccagctatatcactgacagcatggtagaagactgcgaacctcacttctagactttcacggtgggacgaaacgggttcagaaactgccaggggcctcatacagggatatcaaaataccctttgtgctagcccaggccctggggaatcaggtgactcacacaaatgcaatagttggtcactgcatttttacctgaaccaaagctaaacccggtgttgccaccatgcaccatggcatgccagagttcaacactgttgctcttgaaaatctgggtctgaaaaaacgcacaagagcccctgccctgccctagctgaggcacacagggagacccagtgaggataagcacagattgaattgtacaatttgcagatgcagatgtaaatgcatgggacatgcatgataactcagagttgacattttaaaacttgccacacttatttcaaatatttgtactcagctatgttaacatgtactgtagacatcaaacttgtggccatactaataaaattattaaaaggagcacaaaaaaaaaaaaaaaa

SEQ ID NO: 368 - DNA, 1665 bp, Homo sapiens
  CDS 109..738
  sig_peptide 109..405: Von Heijne matrix score 4.5 seq LAPGSFLAAVVDA/LE
  polyA_signal 1633..1638
  polyA_site 1650..1665
cccagcgttcctcctccggccccaggtcaccgccagcacgcgcctgcttcccgtctgcgcgagtccacgcagctccccaggcccttcaccagcacagcagcagcaggcatggcagcaagcgtggagcagcgcgagggcaccatccaggtgcagggccaggccctcttcttccgagaggccctgcccggcagtgggcaggctcgcttctctgtactgctgctgcatggtattcgcttctcctccgagacctggcagaacctgggtacactgcacaggctggcccaggctggctaccgggctgtggccattgacctgccaggtctggggcactccaaggaagcagcagcccctgcccctattggggagctggcccctggcagcttcctggcggctgtggtggatgccttggagctgggccccccggttgtgatcagtccatcactgagtggcatgtactccctgcccttcctcacggcccctggctcccagctcccgggctttgtgccagtggcccccatctgcactgacaaaatcaatgctgccaactatgccagtgtgaagactccagctctgattgtatatggagaccaggaccccatgggtcagaccagctttgagcacctgaagcagctgcccaaccaccgggtgctgatcatgaagggggcggggcacccctgttacctggacaaaccagaggagtggcatacagggctgctggacttcctgcaggggctccagtgaagcccagcactgctgcagggggtgggctgcctgcctgctctgagctctctcttgcacgctctctcttctctcccaggctctggctcatgcacatgcaacaggtgcgtctgtctatatgtctgggttcttgtcttttgtggtctgtttgtcttttctacctctttctcttgcagtgatagactgagggggtaaaatcaagagaaaaaactctcaggaatcaaggaacataatcctgtggagggtaatccattacatgagcttctcctgttcttccactttcctgcctggctttcactccttcccctgctctgcccagcctttccctcccacccactcctacttctgcaaatgccctgaaggccagcccttaccccaacacccacttccccacctccttaggccccagatacatacatgcccacatgcacgcttacatgtttagagccatccttgtttccaaatatgacccttcgcttgagggcaactgcataggtacatctaactctggactggcatgcacattgtcatgtgcagctttgcatatacacacatgcatacatgagcctccacacaagcacttgcacacatgtggactcctaaccatgctaacctcactggctgggaaggtggggaccccatgggccagcccttgcaggaggcccttttgcaaggcttagggtgtggccagccctgaaagctacttggacacaggtttcagctggccccagcccagaagtgacccccagaaagggagggccaccgctttgccccctgcttttacccttccttctgggtgctctacacctcaggttaccaggcctgaggcatctcagccaagcttgtttcctgctctgaggcttgtggggtgggagccagagtggaggtcggtgaaataaagtgatgcaattaaaaaaaaaaaaaaaa

SEQ ID NO: 369 - DNA, 425 bp, Homo sapiens
  CDS 55..291
  sig_peptide 55..255: Von Heijne matrix score 4.4 seq LISLVASLFMGFG/VL
  polyA_signal 390..395
  polyA_site 410..425
ctgccgacgtgttcttccggtggcggagcggcggattagccttcgcggggcaaaatggagctcgaggccatgagcagatataccagcccagtgaacccagctgtcttcccccatctgaccgtggtgcttttggccattggcatgttcttcaccgcctggttcttcgtttacgaggtcacctctaccaagtacactcgtgatatctataaagagctcctcatctccttagtggcctcactcttcatgggctttggagtcctcttcctgctgctctgggttggcatctacgtgtgagcacccaagggtaacaaccagatggcttcactgaaacctgcttttgtaaattacttttttttactgttgctggaaatgtcccacctgctgctcataataaatgcagatgtataacaaaaaaaaaaaaaaaa

SEQ ID NO: 370 - DNA, 546 bp, Homo sapiens
  CDS 25..276
  polyA_signal 508..513
  polyA_site 533..546
gttgcaccaggcgatgcaagacacatggcagtctggcctgaagtttcccaaaacaggctgactaggggcctactgcttcccaactaccagctgagggggtccgtcccgaaaagggagaagaggcctaagaggaaacatcaacatctttttactcctagcgagcggcattctgtctgccttgattgtcttctggaaatatcgctttcagggaaacaatggcgaaatgtcatcagtttcaactgcttttgcactactaagacgcttttctgggttaattagcagcaatacagacaacgatcttttattcaacaacctctctcgagatattttaaataatttctcacactcgaaaaacatgcagaagcgactattggcaaacctgaagagggtggaataccaaatggctgaactggaatattttctagttagcgagggtttgagaggtgcgtcaggtctccagaaattcacctcaaaagcgtacaggatgtaatgccagtggtggaaatcattaaagacactttgagtagattcaaaaaaaaaaaaaaa

SEQ ID NO: 371 - DNA, 485 bp, Homo sapiens
  CDS 32..307
  sig_peptide 32..91: Von Heijne matrix score 7.4 seq LVFCVGLLTMAKA/ES
  polyA_signal 452..457
  polyA_site 472..485
ctttcagcaggggacagcccgattggggacaatggcgtctcttggccacatcttggttttctgtgtgggtctcctcaccatggccaaggcagaaagtccaaaggaacacgacccgttcacttacgactaccagtccctgcagatcggaggcctcgtcatcgccgggatcctcttcatcctgggcatcctcatcgtgctgagcagaagatgccggtgcaagttcaaccagcagcagaggactggggaacccgatgaagaggagggaactttccgcagctccatccgccgtctgtccacccgcaggcggtagaaacacctggagcgatggaatccggccaggactcccctggcacctgacatctcccacgctccacctgcgcgcccaccgccccctccgccgccccttccccagccctgcccccgcagactccccctgccgccaagacttccaataaaacgtgcgttcctctcaaaaaaaaaagaaa

SEQ ID NO: 372 - DNA, 1394 bp, Homo sapiens
  CDS 46..675
  sig_peptide 46..87: Von Heijne matrix score 5.9 seq LTLLGLSLILAGL/IV
  polyA_signal 1363..1368
  polyA_site 1382..1394
ctccgagttgccacccaggaaaaagagggctcctctgggagatgtatgcttactctcttaggcctttcactcatcttggcaggacttattgttggtggagcctgcatttacaagcacttcatgcccaagagcaccatttaccgtggagagatgtgcttttttgattctgaggatcctgcaaattcccttcgtggaggagagcctaacttcctgcctgtgactgaggaggctgacattcgtgaggatgacaacattgcaatcattgatgtgcctgtccccagtttctctgatagtgaccctgcagcaattattcatgactttgaaaagggaatgactgcttacctggacttgttgctggggaactgctatctgatgcccctcaatacttctattgttatgcctccagaaaatctggtagagctctttggcaaactggcgagtggcagatatctgcctcaaacttatgtggttcgagaagacctagttgctgtggaggaaattcgtgatgttagtaaccttggcatctttatttaccaactttgcaataacagaaagtccttccgccttcgtcgcagagacctcttgctgggtttcaacaaacgtgccattgataaatgctggaagattagacacttccccaacgaatttattgttgagaccaagatctgtcaagagtaagaggcaacagatagagtgtccttggtaacaagaagtcagagatttacaatatgactttaacattaaggtttatgggatactcaagatatttactcatgcatttactctattgcttatgctttaaaaaaaggaaaaaaaaaaactactaaccactgcaagctcttgtcaaattttagtttaattggcattgcttgttttttgaaactgaaattacctgagtttcattttttctttgaatttatagggtttagatttctgaaagcagcatgaatatatcacctaacatcctgacaataaattccatccgttgttttttttgtttgtttgttttttcttttcctttaagtaagctctttattcatcttatggtgcagcaattttaaaatttgaaatattttaaattgtttttgaactttttgtgtaaaatatatcagatctcaacattgttggtttcttttgtttttcattttgtacaactttcttgaatttagaaattacatctttgcagctctgttaggtgctctgtaattaacctgacttatatgtgaacaattttcatgagacagtcatttttaaataatgcagtgattctttctcactactatctgtattgtggaatgcacaaaattgtgtaggtgctgaatgctgtaaggagtttaggttgtatgaattctacaaccctataataaattttactctatacaaaaaaaaaaaaa

SEQ ID NO: 373 - DNA, 1333 bp, Homo sapiens
  CDS 329..943
  sig_peptide 329..745: Von Heijne matrix score 4.2 seq SLSLALKTGPTSG/LC
  polyA_site 1322..1333
cgccagtgtcagtggtgttggcatcagcttgggcaggtgtgcgggctcaggatggggcggccgtggtgaggaaccctggactctcagcatcacaagaggcaacaccaggagccaacatgagctcgggactgaactgctgtggcccggagcagcgctgctggtgctgttgggggtggcagccagtctgtgtgtgcgctgctcacgcccaggtgcaaagaggtcagagagaatctaccagcagagaagtctgcgtgaggaccaacagagctttacggggtcccggacctactccttggtcgggcaggcatggccaggacccctggcggacatggcacccacaaggaaggacaagctgttgcaattctaccccagcctggaggatccagcatcttccaggtaccagaacttcagcaaaggaagcagacacgggtcggaggaagcctacatagaccccattgccatggagtattacaactgggggcggttctcgaagcccccagaaggtgaggcgaaggacaaagccggaggtggaggaagtggtgtgggagctcagggcagaagccatacctccaggcaggagaggaggctgggcctgggttcggatgatgatgccaattcctacgagaatgtgctcatttgcaagcagaaaaccacagagacaggtgcccagcaggaggacgtaggtggcctctgcagaggggacctcagcctgtcactggccctgaagactggccccacttctggtctctgtccctctgcctccccggaagaagatggggaatctgaggattatcagaactcagcatccatccatcaatggcgcgagtccaggaaggtcatggggcaactccagagagaagcatcccctggcccggtgggaagcccagacgaggaggacggggaaccggattacgtgaatggggaggtggcagccacagaagcctagggcagaccaagaagaaaggagccaaggcaaagaggggccactgtgctcatggacccatcgctgccttccaaggaccatttcccagagctactcaacttttaagcccctgccatggttgctcctggaaggagaaccagccaccctgaggaccacctggccatgcgtgcacagcctgggaaaagacagttactcacgggagctgcaggcccgtcaccaagccctctcccgacccaggctttgtggggcaggcacctggtaccatgggtaacccggctcctggtatggacggatgcgcaggatttaggataagctgtcacccagtccccataacaaaaccactgtccaacactggtatctgtgttcttttgtgctatgaaaaaaaaaaaa

SEQ ID NO: 374 - DNA, 326 bp, Homo sapiens
  CDS 27..281
  sig_peptide 27..77: Von Heijne matrix score 8.2 seq LLLITAILAVAVG/FP
gaaaagaactgactgaaacgtttgagatgaagaaagttctcctcctgatcacagccatcttggcagtggctgttggtttcccagtctctcaagaccaggaacgagaaaaaagaagtatcagtgacagcgatgaattagcttcagggttttttgtgttcccttacccatatccatttcgcccacttccaccaattccatttccaagatttccatggtttagacgtaattttcctattccaatacctgaatctgcccctacaactccccttcctagcgaaaagtaaacaagaaggaaaagtcacgataaacctggtcacctgaaattg

SEQ ID NO: 375 - DNA, 703 bp, Homo sapiens
  CDS 61..405
  sig_peptide 61..213: Von Heijne matrix score 8.1 seq VCLCGTFCFPCLG/CQ
  polyA_signal 675..680
  polyA_site 692..703
catttcctgctcggaaccttgtttactaatttccactgcttttaaggccctgcactgaaaatgcaagctcaggcgccggtggtcgttgtgacccaacctggagtcggtcccggtccggccccccagaactccaactggcagacaggcatgtgtgactgtttcagcgactgcggagtctgtctctgtggcacattttgtttcccgtgccttgggtgtcaagttgcagctgatatgaatgaatgctgtctgtgtggaacaagcgtcgcaatgaggactctctacaggacccgatatggcatccctggacctatttgtgatgactatatggcaactctttgctgtcctcattgtactctttgccaaatcaagagagatatcaacagaaggagagccatgcgtactttctaaaaactgatggtgaaaagctcttaccgaagcaacaaaattcagcagacacctctccagcttgagttcttcaccatcttttgcaactgaaatatgatggatatgcttaagtacaactgatggcatgaaaaaaatcaaatttttgatttattataaatgaatgttgtccctgaacttagctaaatggtgcaacttagtttctccttgctttcatattatcgaatttcctggcttataaactttttaaattacatttgaaatataaaccaaatgaaatattttactcaaaaaaaaaaaa

SEQ ID NO: 376 - DNA, 768 bp, Homo sapiens
  CDS 137..379
  sig_peptide 137..229: Von Heijne matrix score 4.4 seq TCCHLGLPHPVRA/PR
  polyA_signal 728..733
  polyA_site 755..768
tcggagttggaaagggacgcctggtttccccccaagcgaaccgggatgggaagtgacttcaatgagattgaacttcagctggattgaaagagaggctagaagttccgcttgccagcagcccccttagtagagcggaatgagtaatacccacacggtgcttgtctcacttccccatccgcacccggccctcacctgctgtcacctcggcctcccacacccggtccgcgctccccgccctcttcctcgcgtagaaccgtgggatcctaggtggcaggactcagagctaaggtatccacaggccatgaattccttcctaaatgagcggtcatcgccgtgcaggaccttaaggcaagaagcatcggctgacagatgtgatctctgaacctgatagattgctgattttatcttattttatccttgacttggtacaagttttgggatttctgaaaagaccatgcagataaccacaaatatcaagaaagtcgtcttcagtattaagtagaatttagatttaggtttccttcctgcttcccacctccttcgaataaggaaacgtctttgggaccaactttatggaataaataagctgagctgtatttcaagtaatatagttataaattaacaatgtagcagttattgatagagaaattgagaaaactgaaacgtgaccggagtattggaaataacgtagtacatcacctagcacaatgacacatagtaggtgctcaataaatttatgcttataatttttgtcaaaaaaaaaaataa

SEQ ID NO: 377 - DNA, 1007 bp, Homo sapiens
  CDS 37..741
  sig_peptide 37..153: Von Heijne matrix score 7.2 seq SALAKLLLTCCSA/LR
  polyA_signal 969..974
  polyA_site 994..1007
cgcaggtcccgaggagcgcagactgtgtccctgacaatgggaacagccgacagtgatgagatggccccggaggccccacagcacacccacatcgatgtgcacatccaccaggagtctgccctggccaagctcctgctcacctgctgctctgcgctgcggccccgggccacccaggccaggggcagcagccggctgctggtggcctcgtgggtgatgcagatcgtgctggggatcttgagtgcagtcctaggaggatttttctacatccgcgactacaccctcctcgtcacctcgggggctgccatctggacaggggctgtggctgtgctggctggagctgctgccttcatttacgagaaacggggtggtacatactgggccctgctgaggactctgctagcgctggcagctttctccacagccatcgctgccctcaaactttggaatgaagatttccgatatggctactcttattacaacagtgcctgccgcatctccagctcgagtgactggaacactccagcccccactcagagtccagaagaagtcagaaggctacacctatgtacctccttcatggacatgctgaaggccttgttcagaacccttcaggccatgctcttgggtgtctggattctgctgcttctggcatctctggcccctctgtggctgtactgctggagaatgttcccaaccaaagggaaaagagaccagaaggaaatgttggaagtgagtggaatctagccatgcctctcctgattattagtgcctggtgcttctgcaccgggcgtccctgcatctgactgctggaagaagaaccagactgaggaaaagaggctcttcaacagccccagttatcctggccccatgaccgtggccacagccctgctccagcagcacttgcccattccttacaccccttccccatcctgctccgcttcatgtcccctcctgagtagtcatgtgataataaactctcatgttattgttcccaaaaaaaaaaaaaa

SEQ ID NO: 378 - DNA, 527 bp, Homo sapiens
  CDS 80..265
  sig_peptide 80..142: Von Heijne matrix score 5.4 seq TFCLIFGLGAVWG/LG
  polyA_signal 491..496
  polyA_site 517..527
cccgcttgattccaagaacctcttcgatttttatttttatttttaaagagggagacgatggactgagctgatccgcaccatggagtctcgggtcttactgagaacattctgtttgatcttcggtctcggagcagtttgggggcttggtgtggacccttccctacagattgacgtcttaacagagttagaacttggggagtccacgaccggagtgcgtcaggtcccggggctgcataatgggacgaaagcctttctctttcaagcgtgactgaagcagcagcctgcacatgtggatggtcatcagtgcctcgcccagagatacctggccttcatccaaagggaccctgctgccacaagtcctccaggcagcacccgcactgtggctccttcgcactgagtatgttggactctgccatagactgaccctcttgtctggctgctgcagtttgtctgtaatgccctgacatgttgcattctccccatttggataaataaaaacaaacaaatgcttctgtcaaaaaaaaaaa

SEQ ID NO: 379 - DNA, 861 bp, Homo sapiens
  CDS 612..644
  polyA_signal 829..834
  polyA_site 850..861
agctctggtggttctggctgctctggactgtcctcatcctctttagctgctgttgcgccttccgccaccgacgagctaaactcaggctgcaacaacagcagcggcagcgtgaaatcaacttgttggcctatcatggggcatgccatggggctggtcctttccctaccggttcactgcttgaccttcgcctcctcagcaccttcaagcccccagcctacgaggatgtggttcaccgcccaggcacaccaccccccccttatactgtggccccaggccgccccttgactgcttccagtgaacaaacctgctgttcctcctcatccagctgccctgcccactttgaaggaacaaatgtggaaggtgtttcctcccaccagagtgccccccctcatcaggagggtgagcccggggcaggggtgacccctgcctccacacccccctcctgccgctatcgccgtttaactggcgactccggtattgagctctgcccttgtcctgcctccggtgagggtgagccagtcaaggaggtgagggttagtgccaccctgccagatctggaggactactccccgtgtgcactacccccagagtctgtaccgcagatctttcccatggggctgtcttccagtgaaggggacatcccataagtagttttgagagggtggatgggttacttgcccaccagaaacagccctagtcccaactccttgcgttcctttggcccctccctgcctacctagaatctgcctgaaggggctggagagggacagtattgggggactgtgctagctttacccccgcaggacatacacaggagcctttgatctcattaaagagatgtaaaccagcaaaaaaaaaaaa

SEQ ID NO: 380 - DNA, 239 bp, Homo sapiens
  CDS 61..228
  sig_peptide 61..162: Von Heijne matrix score 4 seq IAVLYLHLYDVFG/DP
  polyA_signal 208..213
aatctgactcctgagttctcacaacgcttgaccaataagattcggaagcttcttcagcaaatggagagaggcctgaaatcagcagaccctcgggatggcaccggttacactggctgggcaggtattgctgtgctttacttacatctttatgatgtatttggggaccctgcctctatgttctgtaaagtatttgacttactagttctcaataaaattttattaggactataaaaaaaaaa

SEQ ID NO: 381 - DNA, 542 bp, Homo sapiens
  CDS 15..311
  sig_peptide 15..110: Von Heijne matrix score 3.5 seq RIHLCQRSXGSQG/VR
  polyA_signal 507..512
  polyA_site 531..542
agatattaacaaggatggcggcggccgcagcaagtcgaggagtcggggcaaagctgggcctgcgtgagattcgcatccacttatgtcagcgctcgsccggcagccagggcgtcagggacttcattgagaaacgctacgtggagctgaagaaggcgaatcccgacctacccatcctaatccgcgaatgctccgatgtgcagcccaagctctgggcccgctacgcatttggccaaragacgaatgtccctttgaacaacttcagtgctgatcaggtaaccagarccctggagaacgttctaagtggtaaagcctgaagcctccactgaggattaagagcaacagccccagagcctgggctctgctggacttartataatgtgaaaaaaatgtgttctcctattcctcataaagcttgtgctgtaaaatactttctcagggtgttcttgtcctcatctaccctctaccccttactgtgcaaccactgaggcaaagtagcttaatataaaaataaaactttattctgtctcatcaaaaaaaaaaaa

SEQ ID NO: 382 - DNA, 909 bp, Homo sapiens
  CDS 50..529
  sig_peptide 50..130: Von Heijne matrix score 7.19999980926514 seq VLWLSGLSEPGAA/RQ
  polyA_signal 877..882
  polyA_site 899..909
aagacggtggcgcgattgggacagtcgccagggatggctgagcgtgaagatgcagcgggtgtccgggctgctctcctggacgctgagcagagtcctgtggctctccggcctctctgagccgggagctgcccggcagccccggatcatggaagagaaagcgctagaggtttatgatttgattagaactatccgggacccagaaaagcccaatactttagaagaactggaagtggtctcggaaagttgtgtggaagttcaggagataaatgaagaaraatatctggttattatcaggttcacgccaacagtacctcattgctctttggcgactcttattgggctgtgcytaarwktaaaacttcagcgatgtttaccatttaaacataagttggmaatctacatttctgaaggaacccactcarsagargaagacatcaatwwkcagataaatgacaaagagcgwktggcakctgcaatggaaaaccccawcttacgggaaattgtggaacagtgtgtccttgaacctgactgawakctgttttaaragccactggcctgtaattgtttgatatatttgtttaaactctttgtataatgtcagaggactcatgtttaatacataggtgatttgtacctcagagcattttttaaaggattctttccaagcgagatttaattataaggtagtacctaatttgttcaatgtataacattctcaggatttgtaacacttaaatgatcagacagaataatattttctagttattatgtgtaagatgagttgctatttttctgatgctcattctgatacaactatttttcgtgtcaaatatctactgtgcccaaatgtactcaatttaaatcattactctgtaaaataaataagcagatgattcttaaaaaaaaaaa

SEQ ID NO: 383 - DNA, 1149 bp, Homo sapiens
  CDS 240..416
  sig_peptide 240..305: Von Heijne matrix score 3.70000004768372 seq AVLDCAFYDPTHA/WS
  polyA_signal 1117..1122
  polyA_site 1139..1149
actagcctgcgagtgttctgagggaagcaaggaggcggcggcggccgcagcgagtggcgagtagtggaaacgttgcttctgaggggtgtccaagatgaccggttctaacggagttcaagctgaaccagccacccgaggatggcatctcctccgtgaagttcagccccaacacctcccagttcctgcttgtctcctcctgggacacgtccgtgcgtctctacgatgtgccggccaactccatgcggctcaagtaccagcacaccggcgccgtcctggactgcgccttctacgatccaacgcatgcctggagtggaggactagatcatcaattgaaaatgcatgatttgaacactgatcaagaaaatcttgttgggaccatgatgcccctatcagatgtgttgaatactgtccacaaatgaatgtgatggtcmctggaakttgggatcaaacagttaaactgtgggatcccamaactccttgtaatgctgggaccttctctcmkcctgaaaaggtatataccctctcagtgtctggagaccggctgattgtgggaacagcaggccgcagagtgttggtgtgggacttacggaacatgggttacgtgcagcagcgcagggagtccagcctgaaataccagactcgctgcatacgagcgtttccaaacaagcagggttatgtattaagctctattgaaggccgagtggcagttgagtatttggacccaagccctgaggtacagaagaagaagtatgccttcaaatgtcacagactaaaagaaaataatattgagcagatttacccagtcaatgccatttcttttcacaatatccacaatacatttgccacaggtggttctgatggctttgtaaatatttgggatccatttaacaaaaagcgactgtgccaattccatcggtaccccacgagcatcgcatcacttgccttcagtaatgatgggactacgcttgcaatagcgtcatcatatatgtatgaaatggatgacacagaacatcctgaagatggtatcttcattcgccaagtgacagatgcagaaacaaaacccaagtcaccatgtacttgacaagatttcatttacttaagtgccatgttgatgataataaaacaattcgtactccccaaaaaaaaaaa

SEQ ID NO: 384 - DNA, 921 bp, Homo sapiens
  CDS 111..446
  sig_peptide 111..254: Von Heijne matrix score 4.90000009536743 seq PSLAAGLLFGSLA/GL
  polyA_signal 890..895
  polyA_site 909..921
agacacctcgcagtcattcctgcggcttgcgcgcccttgtagacagccggggccttcgtgagaccggtgcaggcctggggtagtctccagtctggacagagaagagaaaaatgcaggacactggctcagtagtgcctttgcattggtttggctttggctacgcagcactggttgcttctggtgggatcattggctatgtaaaagcaggbagcgtgccgtccctggctgcagggctgctctttggcagtctagccggcctgggtgcttaccagctgtctcaggatccaaggaacgtttgggttttcctagctacatctggtaccttggctggcattatgggaatgaggttctaccactctggaaaattcatgcctgcaggtttaattgcaggtgccaktttgctgatggtcgccaaaattggagttagtatgttcaacagaccccattagcagaaktcatgttccagcttagactgatgaagaattaaaaatctgcatcttccactattttcaatatattaagagaaataagtgcagcatttttgcatctgacattttacctaaaaaaaaagacaccaaacttggmararaggtggaaaatcagtcatgattacaaacctacagaggtggcgagtatgtaacacaagagcttaataagaccctcataragcttgattcttgtawattgatgttgtcttttctttckgtatctgtaggtaaatctcaagggtaaaatgttaggtgtcagctttcagggctctgaaaccchattccctgctctgaggaacagtgtgaaaaaaagtcttttaggagatttacaatatctgttcttttgctcatcttagaccacagactgactttgaaattatgttaagtgaaatatcaatgaaaataaagtttactataaataataaaaaaaaaa

SEQ ID NO: 385 - DNA, 916 bp, Homo sapiens
  CDS 123..455
  sig_peptide 123..290: Von Heijne matrix score 4.5 seq FCAGVLLTLLLIA/FI
  polyA_signal 886..891
  polyA_site 904..916
aaagtaatctttatttcgtcatttttgaracatagaagccgtaacggaagcaagtgaaatgctcagtcttagacgactgcgtcgtgctatgaccggactttttcttgaaaggggatgacagcatgggaggcaatggctccacatgtaaacccgacactgaaagacaaggcactctctccacagcagccccaacaactagccctgcaccctgtctctctaaccaccacaacaaaaaacatttaatccttgccttttgtgctggggttctactgacactgctgctgatagcctttatcttcctcatcataaagagctacagaaaatatcactccaagccccaggccccagatcctcactcagatcctccakccrrgctttcatccatcccaggggaatcacttacctatgccagcacaagskttcaaactctcagaakaamagagcamycacttggctgagaaccattctgcagactttgaccccakkgtctatgctcaaattaaagtaacaaactaactcagcttttccaatgaggcttgaatccatttcctcksatctcagccctatcttcacasatcactttcacttttttacawattttggaccaccacctgtgtgaaactgcagtcggagttgtttasatgtgatctggcaatgctatccagcatctttggagaccaatggtcagtcttttcctggccakaggaaasattgatggccctcccasttggaactgacagcctgtgagccccttgggggcatagactgccttccttggacccttccaaagtgtgtggtacrgagctcagtgcacagagtattcacccagcatcatgaatcaacttgggaggagtcaaccaaatgaacaatctaccaaaaatttcaaataaagtcaaaccccccacaaaaaaaaaaa

SEQ ID NO: 386 - DNA, 520 bp, Homo sapiens
  CDS 2..433
  sig_peptide 2..232: Von Heijne matrix score 4.40000009536743 seq FEARIALLPLLQA/ET
  polyA_signal 488..493
  polyA_site 510..520
aatggcggcgtcaaaggtgaagcaggacatgcctccrmcggggggctatgggcccatcgactacaaacggaacttgccgcgtcgaggactgtcgggctacagcatgctggccatagggattggaaccctgatctacgggcactggagcataatgaagtggaaccgtgagcgcaggcgcctacaaatcgaggacttcgaggctcgcatcgcgctgttgccactgttacaggcagaaaccgaccggaggaccttgcagatgcttcgggagaacctggaggaggaggccatcatcatgaaggacgtgcccgactggaaggtgggggaktctgtgtyccacacaacccgctgggtgccccccttgatcggggagctgtacgggctgcgcaccacaaaggaggctctccatgccagccacggcttcatgtggtacacgtaggccctgtgccctccggccacctggatccctgcccctccccactggggacggaataaatgctctgcagacctggaaaaaaaaaaa

SEQ ID NO: 387 - DNA, 568 bp, Homo sapiens
  CDS 34..363
  sig_peptide 34..87: Von Heijne matrix score 8.30000019073486 seq LLSLSSLPLVLLG/WE
  polyA_signal 536..541
  polyA_site 558..568
aaccagacttctgaccccttgggcaacagccagatggagactggtcgccttttgagcctcagctctcttcctcttgttctcctagggtgggagtacagcagccaaacgctgaacttagtcccatccacttccatcttatcctttgtgcccttcatccccctgcatcttgtcctttttgccctctggtacctcccagtgccccatcatctctacccccagggactcggaratcatgcagcaraagcagaaraaggcaaacgaraagaaggaggaacccaaktagctttgtggcttcgtgtccaaccctcttgcccttcgcctgtgtgcctggagccagtcccaccacgctcgcgtttcctcctgtagtgctcacaggtcccagcaccgatggcattccctttgccctgagtctgcarcgggtcccttttgtgcttccttcccctcaggtagcctctctccccctgggccactcccgggggtgagggggtttaccccttcccagtgttttttattcctgtggggctcaccccaaagtattaaaagtagctttgtaattcaaaaaaaaaaa

SEQ ID NO: 388 - DNA, 419 bp, Homo sapiens
  CDS 50..286
  sig_peptide 50..157: Von Heijne matrix score 4.80000019073486 seq VLLAIGMFFTAWF/FV
  polyA_signal 385..390
  polyA_site 405..416
agacgtgttcttccggtggcggasggcggattagccttcgcggggcaaaatggagctcgaggccatgagcagatataccagcccagtgaacccagctgtcttcccccatctgaccgtggtgcttttggccattggcatgttcttcaccgcctggttcttcgtttacgaggtcacctctaccaagtacactcgtgatatctataaagagctcctcatctccttagtggcctcactcttcatgggctttggagtcctcttcctgctgctctgggttggcatctacgtgtgagcacccaagggtaacaaccagatggcttcactgaaacctgcttttgtaaattacttttttttactgttgctggaagtgtcccacctgctgctcataataaatgcagaagtatagcaaaaaaaaaaaaccc

SEQ ID NO: 389 - DNA, 1289 bp, Homo sapiens
  CDS 50..637
  sig_peptide 50..151: Von Heijne matrix score 5.90000009536743 seq LGAAALALLLANT/DV
  polyA_site 1277..1289
aatatacttctttgtcaagagaagcagaggtgtggacgctgtgtatgaaatgtctttcctccaggacccaagtttcttcaccatggggatgtggtccattggtgcaggagccctgggggctgctgccttggcattgctgcttgccaacacagacgtgtttctgtccaagccccagaaagcggccctggagtacctggaggatatagacctgaaaacactggagaaggaaccaaggactttcaaagcaaaggagctatgggaaaaaaatggagctgtgattatggccgtgcggaggccaggctgtttcctctgtcgagaggaagctgcggatctgtcctccctgaaaagcatgttggaccagctgggcgtccccctctatgcagtggtaaaggascacatcrggactgaaktgaaggatttccagccttatttcaaaggagaaatcttcctggatgaaaaraaaaagttctatggtccacaaaggcggaagatgatgtttatgggatttatccgtctgggaatgtggtacaacttcttccgarcctggaacggargcttctctggaaacctggaaggaraaggcttcatccttgggggaattttcgtggtgggatcaasgaaagcagggcattcttcttgarcmccgagaaaaagaatttggagacaaagtaaacctactttctgttctggaagctgctaagatgatcaaaccacagactttggcctcagagaaaaaatgattgtgtgaaactgcccagctcagggataaccagggacattcacctgtgttcatgggatgtattgtttccactcgtgtccctaaggagtgagaaacccatttatactctactctcagtatggattattaatgtattttaatattctgtttaggcccactaaggcaaaatasccccaaaacaagactgacaaaaatctgaaaaactaatgaggattattaagctaaaacctgggaaataggaggcttaaaattgactgccaggctgggtgcagtggctcacacctgtaatcccagcactttgggaggccaaggtgagcaagtcacttgaggtcgggagttcgagaccagcctgagcaacatggcgaaaccccgtctctackaaaaatacaraaatcacccgggtgtggtggcaggcacctgtagtcccagctacccgggaggctgaggcaggagaatcacttgaacctgggaggtggaggttgcggtgagctgagatcacaccactgtattccagcctgggtgactgagactctaaccaaaaaaaaaaaaa

SEQ ID NO: 390 - DNA, 715 bp, Homo sapiens
  CDS 72..602
  sig_peptide 72..125: Von Heijne matrix score 5.59999990463257 seq LTPLFFMFPTGFS/SP
  polyA_site 704..715
acttcccttccccctctagcattgctaccttctctcctacacgcacgcaggcatataaacgtaggtttttgatgctcctctgcctgttgaccccgctatttttcatgtttccaacaggtttttcttcccccagtccctcagctgctgctgctgctcaggaggtcagatctgccactgatggtaataccagcaccactccgcccacctctgccaaraarakaaagttaaacagcagcagcagtagcagcagtaacagtagtaacgagagagaagactttgattcsacctcttcctcctcttccactcctcctttacaacccagggattcggcatccccttcaacctcgtccttctgcctgggggtttcagtggctgcttccagccacgtaccgataswgaaraagctgcgttttgaaracaccctggagtttgtagggtttgatgcgaaratggctgargaatcctcctcctcctcctcctcatcttcaccaackgctgcaacatctcagcagcagcaacttaaaaataagagtatattgaatctcttctgtggcttcggtgcatcatgcaaacggcctagccaaatcttctaccaccgtctctagctttgctaacagcaaacctggctctgctaagaagttagtgatcaagaactttaaagataagcctaaattaccagaaaactacacagatgaaacctggcaaaaaaaaaaaa

SEQ ID NO: 391 - DNA, 931 bp, Homo sapiens
  CDS 120..434
  sig_peptide 120..185: Von Heijne matrix score 6.30000019073486 seq FALVWLWLRSTGC/FW
  polyA_signal 899..904
  polyA_site 918..931
aatttccggcgacacctcgcagtcattcctgcggcttgcgcgcccttgtagacagccggggccttcgtgagaccggtgcaggcctggggtagtctcctgtctggacagagaagagaaaaatgcagggacactggctcagtagtgcctttgcattggtttggctttggctacgcagcactggttgcttctggtgggatcattggctatgtaaaagcaggcagcgtgccgtccctggctgcagggctgctctttggcagtctagccggcctgggtgcttaccagctgtctcaggatccaaggaacgtttgggttttcctagctacatctggtaccttggctggcattatgggaatgaggttctaccactctggaaaattcatgcctgcaggtttaattgcaggtgccagtttgctgatggtcgccaaagttggagttagtatgtkcaacagaccccattagcagaagtcatgttccagcttagatgatgaaraattaaaaatctgcatcttccactattttcaatatattaagagaaataagtgcagcatttttgcatctgacattttacctaaaaaaaaaaacmccaaacttggcaaaaaggtggaaaatcagtcatgattacaaacctacagaggtggcgagtatgtaacacaagagcttaataagaccctcatagagcttgattcttgtatattgatgttgtcttttctttctgtatctgtaggtaaatctcaagggtaaaatgttaggtgtcagctttcagggctctgaaaccchattccctgctctgaggaacagtgtgaaaaaaagtcttttaggaratttacaatatctgttcttttgctcatcttaraccacagactgactttgaaattakgttaagtgaaatatcaatgaaaataaagtttactataaataawaaaaaaaaaaa

SEQ ID NO: 392 - DNA, 891 bp, Homo sapiens
  CDS 4..447
  sig_peptide 4..147: Von Heijne matrix score 5.69999980926514 seq LLLFFGKLLVVGG/VG
  polyA_signal 858..863
  polyA_site 880..891
atcatgatcgccatctacgggaagaatttctgtgtctcagccaaaaatgcgttcatgctactcatgcgaaacattgtcagggtggtcgtcctggacaaagtcacagacctgctgctgttctttgggaagctgctggtggtcggaggcgtgggggtcctgtccttcttttttttctccggtcgcatcccggggctgggtaaagactttaagagcccccacctcaactattactggctgcccaycatgacctccatcctgggggcctatgtcatcgccagyggcttcttcagcgttttcggcatgtgtgtggacacgctcttcctctgcttcctggaagacctggagcggacaacggctccctggacggccctactacatgtccaagagcttctaaagattctgggcaagaagaacgaggcgcccccggacaacaagaaaaggaaaaaktgacagctccggccctgatccaggactgcaccccacccccaccgtccagccatccaacctcacttcgccttacaggtctccattttgtggtaaaaaaaggttttaggccaggcgccgtggctcacgcctgtwatccaacactttgaraggctgaggcgggcggatcacctkaktcaggaktycgagaccakcctggccaacatggtgaaacctccgtctctattaaaaatacaaaaattagccgagagtggtggcatgcacctgtcatcccagctactcgggaggctgaggcaggagaatcgcttgaacccgggaggcagaggttgcagtgagccgagatcgcgccactgcactccaacctgggtgacagactctgtctccaaaacaaaacaaacaaacaaaaagattttattaaagatattttgttaactcaraaaaaaaaaa

SEQ ID NO: 393 - DNA, 817 bp, Homo sapiens
  CDS 28..804
  sig_peptide 28..96: Von Heijne matrix score 10 seq PLLGLLLSLPAGA/DV
  polyA_site 806..817
aaccgagctggatttgtatgttgcaccatgccttcttggatcggggctgtgattcttcccctcttggggctgctgctctccctccccgccggggcggatgtgaaggctcggagctgcggagaggtccgccaggcgtacggtgccaagggattcagcctggcggacatcccctaccaggagatcgcakgggaacacttaagaatctgtcctcaggaatatacatgctgcaccacagaaatggargacaagttaagccaacaaagcaaactcgaatttgaaaaccttgtggaagagacaagccattttgtgcgcaccacttttgtgtccaggcataagaaatttgacgawtttttccgaragctcckggagaatgcaraaaagtcactaaatgatrtgtttgtmcggacctatggcatgctgtacwtgcaraatkcagaagtcttccrggacctcttcacaragctgaaaaggtactacactgggggtaatgtgaatctggaggaaatgctcaatgacttttgggctcggctcctggaacggatgtttcagcwrawaaaccctcagtatcacttcagtgaagactacctggaatgtgtgagcaaatacactgaccakctcaagccatttggagacgtgccccggaaactgaagattcaggtkacccgcgccttcatkgskgccaggacctttgtccaggggctgactgtgggcagagaagttgcaaaccgagtttccaaggtaattgaaaacgtgctttctttctcattggtgttccttgtttattctgtttttaaaaccaatgtttaaaaaaaaaaaa

SEQ ID NO: 394 - DNA, 1020 bp, Homo sapiens
  CDS 27..359
  sig_peptide 27..212: Von Heijne matrix score 3.59999990463257 seq SWLSLLAALAHLA/AA
  polyA_signal 988..993
  polyA_site 1009..1020
agtgggtcgakctggggcgcagtcgcatgggggagtctatcccgctggccgccccggtcccggtggaacaggcggtgctggagacgttcttctctcacctgggtatcttctcttacgacaaggctaaggacaatgtggagaaggaacgagaggccaacaagagcgcggggggcagctggctgtcgctgctggcggccttggcgcacctggccgcggccgagaaggtctatcacagcctcacctacctggggcagaaactaggtacctccgccccgccccccgagccccttgaggaggaagtaaagggggtatattccccadtcggcagtggcttgggtbtcccgtctctgtgtcacttctagtcgcaggctcgactcggcattcccagatctcctcccaccgttcctttccttccctgggcttccacaagccccgcccaccrgcctgcrctgctgatagattggcgaactgggtagatgctctttgcaaggctgtgacccaaaccgaawggtttgcccttttgcctcgtgcatggattgatgccataaatgagaagttaaccaaaaaaaaaaaacmcwdtycckktttmccccccccgggrmcagaagagcaaaactttgcaaaacaacctagttctattactgaacactgttgtgtggcctcttaaggttaaggcccgagagtcacatttagagtcctaccccgtcttcatagtcccccaatacatatttaatgactaaagtwataaatgaatattgggcaggaaaggcaagaaatatgcctaacactagcaagaagagacttaaggggaaaatggtaaacactcttagcacttcatgtacatcttgcctctgaaataagattcaagagctgattcaactgatttttactagtagaagcaataagtataagtagatgagaaggaaataatagatgtaaaaggcatggaatatgcatacaaaataatattactgcttaattatgacaaataaatatattttgaatcctaaaaaaaaaaaa

SEQ ID NO: 395 - DNA, 1399 bp, Homo sapiens
  CDS 25..957
  sig_peptide 25..93: Von Heijne matrix score 4.09999990463257 seq LEAFSQAISAIQA/LR
  polyA_signal 1368..1373
  polyA_site 1388..1399
aakagctgctgtggcggcggcaacatggcggacgtgataaatgtcagtgtgaacctggaggccttttcccaggccattagtgccatccaggcgctgcgatccagcgtgagcagggtgttcgactgcctgaaggatgggatgcggaacaaggagacgctggagggccgggagaaggcctttattgcgcacttccaggacaacttacattcggtcaaccgggacctcaatgagctggaacgtctgagcaatctggtaggcargccatctgaraaccatcctcttcataacagtgggctgttaascctggatcctgtgcargacaaaactcctctctatagtcaactccttcaagcatataagtggtcaaacaagttgcagtaccatgcaggactagcatctggccttttaaatcascartcaktgaagcgtyccgctaatcagatgggagtatctgccaaacgtagaccaaaggctcagcccacaactcttgtcctaccacctcaatatgttgatgatgtgatcagccgcattgacaggatgtttcctgaaatgtccatccacttatccagacccaatggaacatcagcaatgcttctggtgaccttgggaaargtgttgaaagtgawcgtcgtcrtrcggarmctgttcattgatcgaacaatagtwaagggatatwacgagaatgtctacrcagaakatggcmagcttgatatatggtccaaatccaactatcaagtattccagaaggtgacagaccatgccaccactgccctgctccactawmagctgccccagatgccggatgtcgtggtccgatccttcawgacctggttaagaagttacataaagctgttccaggccccgtgccagcgctgcgggaagtttctgcaggacggccttcccccgacatggagggatttccgaaccctcgaagccttccatgacacctgccggcagtagcccccacgctggccccagcctcagaccccacccagcaccttcccagacacgcaggaagcccacagaaggctcagctggttcctcactgcccagatgtgtacagctgctcctccctttcataaagcagcgccatgtgtgcagaggccactcttgaagagcagactccctctgtggctgatgggactaattattcccactagccagcggactgaaggcaaagaagacctttctagaacctggtagaaggaagctgtgcagcatgctcctcgtccatgtgtgtcggcagtgctggtgtctgtcgtctccgcgagctgttactggaatgagcccttgtgttcatgggtatcgtcatgcggggttcttgtgttttgtggggcttgggttttggttaacttatttttataagcaataaaccttttgtatcctgaaaaaaaaaaaa

SEQ ID NO: 396 - DNA, 666 bp, Homo sapiens
  CDS 47..319
  sig_peptide 47..226: Von Heijne matrix score 3.90000009536743 seq SSLVPFFLFTCFG/HF
  polyA_site 656..666
acttttgcctagcatttgactttggtgttttaagttctgtagttccatgacatcattgtttgctgttgtgttacagagagagaaggaacctcacctgtggctcagctcaccccacatccgtttctcattacgtgtaaataaactgtcagagctgatgttacagcttttacagtttaaagcattcccctcgtctctagttccttttttcttgtttacatgttttgggcactttccctcattcaccaccttccagggcttcatagaaaataacttgttacaaaatcagttcaattctaatgtggacatagtggcatgttcataattagacccatataggggacactgagctttaaatcgttgattctaaactctatacattaaaaaaattcagcccaggcccctcaaagcctgaraaaatttaatttgctcttaatttaatgttccaaaactcactcttggaaaaatgcctgttggaaaactacaggtgggtcacatgtkggggctgtctccgtgacactcaggattccagtcaraacctaatcctcatatctattgcctacaaaaatagaccaagaatgttgctgctcttttataatcctttaaatatttaacattcaagttttctttgtcttaaattcagcctcttcctaaaagcaaaaaaaaaaa

SEQ ID NO: 397 - DNA, 1131 bp, Homo sapiens
  CDS 80..940
  sig_peptide 80..130: Von Heijne matrix score 3.70000004768372 seq RIVSAALLAFVQT/HL
  polyA_signal 1101..1106
  polyA_site 1119..1130
agttggtggggctgggggatgagagctgcaccgcgcgggayaagtcgccggcggcgcccgamggagcagaacagagagcatggagctggagaggatcgtcagtgcagccctccttgcctttgtccagacacacctcccggaggccgacctcagtggcttggatgaggtcatcttctcctatgtgcttggggtcctggaggacctgggcccctcgggcccatcagaggagaacttcgatatggaggctttcactgagatgatggaggcctatgtgcctggcttcgcccacatccccaggggcacaataggggacatgatgcagaarctctcagggcagctgagcgatgccvggaacaaagagaacctgcaaccgcagaactctggtgtccaaggtcaggtgcccatctccccagagcccctgcagcggcccgaaatgctcaaagaagagactaggtcttcggctgctgctgctgcagacacccaagatgaggcaactggcgctgaggaggagcttctgccaggggtggatgtactcctggaggtgttccctacctgttcggtggagcaggcccagtgggtgctggccaaagctcggggggacttggaagaagctgtgcagatgctggtagagggaaaggaagaggggcctgcagcctgggagggccccaaccaggacctgcccagacgcctcagaggcccccaaaaggatgagctgaagtccttcatcctgcagaagtacatgatggtggatagcgcagaggatcagaagattcaccggcccatggctcccaaggaggcccccaagaagctgatccgatacatcgacaaccaggtagtgagcaccaaaggggagcgattcaaagatgtgcggaaccctgaggccgaggagatgaaggccacatacatcaacctcaagccagccagaaagtaccgcttccattgaggcactcgccggactctgcccgagccttctaggctcagatcccagagggatgcaggagccctatacccctacacaggggccccctaactcctgtcccccttctctactcctttgctccatagtgttaacctactctcggagctgcctccatgggcacagtaaaggtggcccaaggaaaaaaaaaaawt

SEQ ID NO: 398 - DNA, 475 bp, Homo sapiens
  CDS 146..457
  sig_peptide 146..292: Von Heijne matrix score 5.19999980926514 seq CFLCLYPIPLCTS/HP
  polyA_signal 442..447
  polyA_site 465..475
attgtaacaaacagtaccaatttattttggccgtgggtttttgctttttttccagttgatgactttgtgaacattcccaggtattggagcctctgtggccttaaatgtggctcagtggagggagacccagcatagccaggccagtatggagcacctcacgcacagctctcagaagctgcaggcggacgaacatctgaccaaagaggtgtggtcgaggctcctgaaagagaaagggcctgctggtctcatcctctgcttcctttgcctttaccctatacctctctgcacgtcccaccccgtttkgctgtgtgcycacccccaggatgtgtacccggttgtagtaagagctgaaatccatgctgagctgtaccaggaacttgcatatctaaaaacagaaactgagtcactggcccatctctttgctcttgtgccccaggccaaaataaagaatagagtgtaragtgaaaaaaaaaaa

SEQ ID NO: 399 - DNA, 949 bp, Homo sapiens
  CDS 100..351
  sig_peptide 100..207: Von Heijne matrix score 4.19999980926514 seq CLAVSWEAAGCHG/AG
  polyA_site 940..949
  misc_feature 745: n=a, g, c or t
aaaggaatactgacagataaggccggaaacaaaactgatggcttgaaaaacatttttatggaatgtatttactatcattttgttttactatagaggtagatgggactcttaacttttgggtacattgaaamcakgckgaaaactgaacacaatcctgatcatcactcctgcctggctgtctcctgggaggctgccgggtgccacggagctgggacacagcagagcccgctaggtgttgcagggccctggaggccaaggccaccctgtgtggggtccctgttggcagccaggtccctacacaaacaagtaatcctgtttggcctcctaggttttgcatatgaccacgcagcctaatttggggtgtaggggaacctctgctggcccttgctcctttgtatgttgggtgactttaatggctggccacatacccctttctcccagctactcattcactgacttgggtaagttctagcacaatgcgcacttagaaacagaatgtgacacatcaacattaacttttcctgaaaagaacagtttgcctaacatggacccmaaagaagcttggaatttataagactttcctttataagatatagtgggggtttttttgggtggaggggggttgttttttgttttttgttttcaagacagagtctcgctcagttgtccaggctggartgtaktggcatgatctcggctcactgcarcctctgcctcccaggttcatgccattctcctgcctcancctcccgagtagctgggactacaggtgtctgccgccacgcctggctaatttttttgtatttttagtagagacggggtttcaccatgttggtcaggatggtctcgatttcctgacctcgtgatccgcctgtctcggcctcccaaagtgctgggattacaggcgtgagccaccacgcctggcctataagatacggyaaaaaaaaaa

SEQ ID NO: 400 - DNA, 940 bp, Homo sapiens
  CDS 177..569
  sig_peptide 177..236: Von Heijne matrix score 11.1999998092651 seq AFLLLVALSYTLA/RD
  polyA_site 931..939
  misc_feature 482: n=a, g, c or t
agaagataatcacttggggaaaggaaggttcgtttctgagttagcaacaagtaaatgcagcactagtgggtgggattgaggtatgccctggtgcataaatagagactcagctgtgctggcacactcagaagcttggaccgcatcctagccgccgactcacacaaggcagagttgccatggaaaaaattccagtgtcagcattcttgctccttgtggccctctcctacactctggccagagataccacagtcaaacctggagccaaaaaggacacaaaggactctcgacccaaactgccccagaccctctccagaggttggggtgaccaactcatctggacacaracatatgaaraarctctatwtaaatccaaracaagcaacaaacccttgatgattattcatcacttggatgadtgcccacacagtcaagctttaaaaaaaktgtttgctgaaaataaaraaatccagaaattggcarancagtttgtccycctcaatctggtttatgaaacaactgacaaacacctttctcctgatggccaatatktcccccmggattatgtttgttgacccatctctgacagttagagccgatatcactggaagatattcaaaycgtctctatgcttacgaacctgcagatacagctctgttgcttgacaacatgaagaaagctctcaagttgctgaagactgaattgtaaagaaaaaaaatctccaagcccttctgtctgtcaggccttgagacttgaaaccagaagaagtgtgagaagactggctagtgtggaagcatagtgaacacactgattaggttatggtttaatgttacaacaactattttttaagaaaaacaagttttagaaatttggtttcaagtgtacatgtgtgaaaacaatattgtatactaccatagtgagccatgattttctaaaaaaaaaa

SEQ ID NO: 401 - DNA, 887 bp, Homo sapiens
  CDS 67..459
  sig_peptide 67..135: Von Heijne matrix score 5.19999980926514 seq IGVGLYLLASAAA/FY
  polyA_signal 856..861
  polyA_site 875..887
agcggcggcatccgggacggcgggcgggctggccaccacgggacaggaaggcacagagcatggagaatgatgaacttccgtcagcggatgggatggattggagtgggattgtatctgttagccagtgcagcagcattttactatgtttttgaaatcagtgagacttacaacaggctggccttggaacacattcaacagcaccctggggagccccttgaaggaaccacatggacacactccttgaaagctcaattactctccttgcctttttgggtgtggacagttatttttctggtaccttacttacaratktttttgttcctatactcttgtacaaaavctgatcccaaaacagtgggctactgtwtcatccctatatgcttggcarttatttscaatcgccaccaggattttgtcaaggcttctaatcaaatcagcaaactacaactgattgacacgtaaaatcagtcaccgttttttccctacgattacaaaactgccagtcctatatggagtctgatcacaagactgcagtttcttcacagatctcaggaagttgtcgtggggcagaggctttttaaaaacatgtgattagggagctatctttatctgaataataacgaatttttaggtaaaacctgagatagagtactacaaaatcatgttgatgacttcagattttggaagttaaatcatgtctgttatttgcattctttagaaacttgactaagtacctgaattcatatttctattctactgtgcaacatagtgatgattcagaaatttttcctttggggaaaaaaatgaatatgaacatttccattgtgttaagtgtaaaaaggtccagkacatgatcataaaatttaaattttatacaaaaaaaaaaa

SEQ ID NO: 402 - DNA, 2010 bp, Homo sapiens
  CDS 65..1069
  sig_peptide 65..112: Von Heijne matrix score 12.5 seq FVVLLALVAGVLG/NE
  polyA_signal 1978..1983
  polyA_site 1999..2010
atgtcgcccgtgtcccgccggcccgttccgtgtcgccccgcagtgytgcggccgccgckkcaccatggctgtgtttgtcgtgctcctggcgttggtggcgggtgttttggggaacgagtttagtatattaaaatcaccagggtctgttgttttccgaaatggaaattggcctataccaggagagcggatcccagacgtggctgcattgtccatgggcttctctgtgaaagaagacctttcttggccaggactcgcagtgggtaacctgtttcatcgtcctcgggctagcgtcatggtgatggtgaagggagttaacaactmccctctacccccaggctgtgtcatttcgtaccctttggagaatgcagttccttttagtcttgacagtgttgcaaattccattcactccttattttctgaggaaactcctgttgttttgcagttggctcccagtgaggaaagagtgtatatggtagggaaggcmaactcagtgtggaaracctttcagtcacttgcgccagctccgktaatcrcctgtttcaagaaaactctgttctcagttcactcccccyccattcmactgagtaggaacaatgaagttgaccygctctttctttctgaactgcaagtgctacatgatatttcaagcttgctgtctcgtcataagcatctagccaaggatcattctcctgatttatattcactggagctggcaggtttggatgaaattgggaagcgttatggggaagactctgaacaattcagagatgcttctaagatccttgttgacgctctgcaaaagtttgcagatgacatgtacagtctttatggtgggaatgcagtggtagagttagtcactgtcaagtcatttgacacctccctcattaggaagacaaggactatccttgaggcaaaacaagcgaagaacccagcaagtccctataaccttgcatataagtataattttgaatattccgtggttttcaacatggtactttggataatgatcgccttggccttggctgtgattatcacctcttacaatatttggaacatggaatcctggatatgatagcatcatttataggatgacaaaccagaagattcggaatggattgaatgttacctgtgccagaattakaaaagggggttggaaattggctgttttgttaaaatatatcttttagtgtgctttaaagtagatagtatactttacatttataaaaaaaaatcaaattttgttctttattttgtgtgtgcctgtgatgtttttctagagtgaattatagtattgacgtgaatcccactgtggtatagattccataatatgcttgaatattatgatatagccatttaataacattgatttcattctgtttaatgaatttggaaatatgcactgaaagaaatgtaaaacatttagaatagctcgtgttatggaaaaaagtgcactgaatttattagacaaacttacgaatgcttaacttctttacacagcataggtgaaaatcatatttgggctattgtatactatgaacaatttgtaaatgtcttaatttgatgtaaataactctgaaacaagagaaaaggtttttaacttagagtagccctaaaatatggatgtgcttatataatcgcttagttttggaactgtatctgagtaacagaggacagctgttttttaaccctcttctgcaagtttgttgacctacatgggctaatatggatactaaaaatactacattgatctaagaagaaactagccttgtggagtatatagatgcttttcattatacacacaaaaatccctgagggacattttgaggcatgaatataaaacatttttatttcagtaacttttccccctgtgtaagttactatggtttgtggtacaacttcattctatagaatattaagtggaagtgggtgaattctactttttatgttggagtggaccaatgtctatcaagagtgacaaataaagttaatgatgattccaaaaaaaaaaaa

SEQ ID NO: 403 - DNA, 387 bp, Homo sapiens
  CDS 70..321
  sig_peptide 70..234: Von Heijne matrix score 4.09999990463257 seq AVCAALLASHPTA/EV
  polyA_signal 364..369
  polyA_site 375..387
agaaatcgtaggacttccgaaagcagcggcggcgtttgcttcactgcttggaagtgtgagtgcgcgaagatgcgaaaggtggttttrattaccggggctagcagtggcattggcctggccctctgcaagcggctgctggcggaagatgatgagcttcatctgtgtttggcgtgcaggaatatgagcaaggcagaagctgtctgtgctgctctgctggcctctcaccccactgctgaggtcaccattgtccaggtggatgtcagcaacctgcagtcattcttccgggcctccaaggaacttaagcaaaggatgatctcttgctgatggattttttttctcatgtgattgtgcascataacacttaataaaataagaaaaaaaaaaaaa

SEQ ID NO: 404 - DNA, 983 bp, Homo sapiens
  CDS 38..877
  sig_peptide 38..91: Von Heijne matrix score 7.40000009536743 seq GWLVLCVLAISLA/SM
  polyA_signal 947..952
  polyA_site 974..983
aatccagtyggasttgacaacaggaggcagaggcatcatggagggtccccggggatggctggtgctctgtgtgctggccatatcgctggcctctatggtgaccgaggacttgtgccgagcaccagacgggaagaaaggggaggcaggaagacctggcagacgggggcggccaggcctcaagggggagcaaggggagccgggggcccctggcatccggacaggcatccaaggccttaaaggagaccagggggaacctgggccctctggaaaccccggcaaggtgggctacccagggcccagcggccccctcggagcccgtggcatcccgggaattaaaggcaccaagggcagcccaggaaacatcaaggaccagccgaggccagccttctccgccattcggcggaaccccccaatggggggcaacgtggtcatcttcgacacggtcatcaccaaccaggaagaaccgtaccagaaccactccggccgattcgtctgcactgtacccgctactactacttcaccttccaggtgctgtcccagtgggaaatctgcctgtccatcgtctcctcctcaaggggccaggtccgacgctccctgggcttctgtgacaccaccaacaaggggctcttccaggtggtgtcagggggcatggtgcttcagctgcagcagggtgaccaggtctgggttgaaaaagaccccaaaaagggtcacatttaccagggctctgaggccgacagcgtcttcagcggcttcctcatcttcccatctgcctgagccagggaaggaccccctcccccacccacctctctggcttccatgctccgcctgtaaaatgggggcgctattgcttcagctgctgaagggagggggctggctctgagagccccaggactggctgccccgtgacacatgctctaagaagctcgtttcttagacctcttcctggaataaacatctgtgtctgtgtctgctgaaaaaaaaaa

SEQ ID NO: 405 - DNA, 1614 bp, Homo sapiens
  CDS 51..470
  sig_peptide 51..203: Von Heijne matrix score 5.80000019073486 seq AVGLFPAPTECFA/RV
  polyA_signal 1585..1590
  polyA_site 1604..1614
ataagcctgtggttgatggaaattcacaaagtgaggcattatcactggaaatgagaaaggatccgagcggggctggcctctggcttcacagtggcggcccagtgcttccatatgtgagagaatcagtaagaagaaatccagcctcagcagccactccgagcacagccgtgggtttgttccctgctccaacagagtgttttgctcgggtgtcctgcagtggtgttgaagctctggggcggcgagactggctgggaggagggcccagggcccactgrmsggcvacagaggmcagtgccccaaaggagagcctcgggtgtcacgactgccacgccatcaaaaagtgccggaaatgggaagttttcaggatgacccaccaagtgcttttcccaagggtctgggctctgagttggaacccgcttgcctgcactccatcctgtctgcaacgctgcacatgtatcccgaaktgctcctgagtgaggaracaaaacgcatktyccttgaccgtytaaagcccatgtttycaaagcaaacaatavaattcaaraarrtgcttaaaagcacctcaratggtckgcaaataacactggggttactggctctgcaaccttttgaattavcaaatacattatgccatagttaaggtacaagcagaacaataccaatagattaattttaagagttgtcttagaatgatttctttcgcataaagtctggatgcaaactgtgcagcccttaggtmcctgctgtagttttgtacgacctggcagacttaaagtaaattgagtttaaattcaaagccagttgatgcggaaggaacttttttggcatgtgttaaattgtgctttaaaagacatataaagaattgggaaacatttcaggagacgatcatagcctgtataaataccagattagaacatacggatttaccatgaagttctgtcttcaacatccattctaaagggctactgtcccaaatcctgtgtgtccttttgacttgtctgatcacccaatggaagtggatacttgtaaagtctacaccactgtacttggcgttaaatcttgctgaattcgtggtaagctgttaccatgtctacattttgtagaatgattttggtctgcagcaaaattcgatttcacttctcatacccctttccttccacttgaaatgcaatttagacagakgccctgtggtgaaagttgcaatattaagtttacctttagaagatcccttctcaaactcagaaccctagcagtgttaccttaaacaaaaatgakctcgagaaaaaagtagctcagttacagagaagcaaatcgagttatttcccacataaaaagtttcccagattctaagaattgcagtatcctgtaccctaaaatttttcaaggtgactcctgttgtcgtctgttgataactttaataaaggtcatttaaggacataagtttttaaagactcccaaagtgaaacttaaacattttcgggattatcgattgcatatatcagtttatgctgtgtgctgaattactatgccatgtgctattttagtgtttggggaaaatgaaaaataaaatttgttctttagcttaataaatawgtcttattttaaaaaaaaaaa

SEQ ID NO: 406 - protein, 325 aa, Homo Sapiens
  SIGNAL -26..-1
MATPLPPPSPRHLRLLRLLLSGLVLGAALRGAAAGHPDVAACPGSLDCALKRRARCPPGAHACGPCLQPFQEDQQGLCVPRMRRPPGGGRPQPRLEDEIDFLAQELARKESGHSTPPLPKDRQRLPEPATLGFSARGQGLELGLPSTPGTPTPTPHTSLGSPVSSDPVHMSPLEPRGGQGDGLALVLILAFCVAGAAALSVASLCWCRLQREIRLTQKADYATAKAPGSPAAPRISPGDQRLAQSAEMYHYQHQRQQMLCLERHKEPPKELDTASSDEENEDGDFTVYECPGLAPTGEMEVRNPLFDHAALSAPLPAPSSPPALP

SEQ ID NO: 407 - protein, 302 aa, Homo Sapiens
  SIGNAL -18..-1
MKAPGRLVLIILCSVVFSAVYILLCCWAGLPLCLATCLDHHFPTGSRPTVPGPLHFSGYSSVPDGKPLVREPCRSCAVVSSSGQMLGSGLGAEIDSAECVFRMNQAPTVGFEADVGQRSTLRVVSHTSVPLLLRNYSHYFQKARDTLYMVWGQGRHMDRVLGGRTYRTLLQLTRMYPGLQVYTFTERMMAYCDQIFQDETGKNRRQSGSFLSTGWFTMILALELCEEIVVYGMVSDSYCREKSHPSVPYHYFEKGRLDECQMYLAHEQAPRSAHRFITEKAVFSRWAKKRPIVFAHPSWRTE

SEQ ID NO: 408 - protein, 249 aa, Homo Sapiens
  SIGNAL -15..-1
MLQLWKLVLLCGVLTGTSESLLDNLGNDLSNVVDKLEPVLHEGLETVDNTLKGILEKLKVDLGVLQKSSAWQLAKQKAQEAEKLLNNVISKLLPTNTDIFGLKISNSLILDVKAEPIDDGKGLNLSFPVTANVTVAGPIIGQIINLKASLDLLTAVTIETDPQTHQPVAVLGECASDPTSISLSLLDKHSQIINKFVNSVINTLKSTVSSLLQKEICPLIRIFIHSLDVNVIQQVVDNPQHKTQLQTLI

SEQ ID NO: 409 - protein, 84 aa, Homo Sapiens
MKVKIKCWNGVATWLWVANDENCGICRMAFNGCCPDCKVPGDDCPLVWGQCSHCFHMHCILKWLHAQQVQQHCPMCRQEWKFKE

SEQ ID NO: 410 - protein, 554 aa, Homo Sapiens
  SIGNAL -13..-1
  UNSURE 259: Xaa = Asp,His,Asn,Tyr
MLYLQGWSMPAVAEVKLRDDQYTLEHMHAFGMYNYLHCDSWYQDSVYYIDTLGRIMNLTVMLDTALGKPREVFRLPTDLTACDNRLCASIHFSSSTWVTLSDGTGRLYVIGTGERGNSASEKWEIMFNEELGDPFIIIHSISLLNAEEHSIATLLLRIEKEELDMKGSGFYVSLEWVTISKKNQDNKKYEIIKRDILRGKSVPHYAAIKPDGNGLMIVSYKSLTFVQAGQDLEENMDEDISEKIKEPLYYWQQTEDDLTVTIRLPEDSTKEXIQIQFLPDHINIVLKDHQFLEGKLYSSIDHESSTWIIKESNSLEISLIKKNEGLTWPELVIGDKQGELIRDSAQCAAIAERLMHLTSEELNPNPDKEKPPCNAQELEECDIFFEESSSLCRFDGNTLKTTHVVNLGSNQYLFSVIVDPKEMPCFCLRHDVDALLWQPHSSKQDDMWEHIATFNALGYVQASKRDKKFFACAPNYSYAALCECLRRVFIYRQPAPMSTVLYNRKEGRQVGQVAKQQVASLETNDPILGFQATNERLFVLTTKNLFLIKVNTEN

SEQ ID NO: 411 - protein, 99 aa, Homo Sapiens
  SIGNAL -48..-1
MDNVQPKIKHRPFCFSVKGHVKMLRLDIINSLVTTVFMLIVSVLALIPETTTLTVGGGVFALVTAVCCLADGALIYRKLLFNPSGPYQKKPVHEKKEVL

SEQ ID NO: 412 - protein, 90 aa, Homo Sapiens
  SIGNAL -32..-1
MPCLDQQLTVHALPCPAQPSSLAFCQVGFLTAQPSPPRRRNGKDRYTLVLQHQECQDDLATSSLVYLSLPCFKDLGRSKHQSITVADTNK

SEQ ID NO: 413 - protein, 115 aa, Homo Sapiens
  SIGNAL -46..-1
MKTLFNPAPAIADLDPQFYTLSDVFCCNESEAEILTGLTVGSAADAGEAALVLLKRGCQVVIITLGAEGCVVLSQTEPEPKHIPTEKVKAVDTTCRPGSRPKSEAASVKKQKHYK

SEQ ID NO: 414 - protein, 66 aa, Homo Sapiens
  SIGNAL -19..-1
MKPLLVVFVFLFLWDPVLAGINSLSSEMHKKCYKNGICRLECYESEMLVAYCMFQLECCVKGNPAP

SEQ ID NO: 415 - protein, 133 aa, Homo Sapiens
  SIGNAL -21..-1
MSCSLKFTLIVIFFYCWLSSSHEELEGGTSKSFDLHTVIMLVIAGGILAALLLLIVVVLCLYFKIHNALKAAKEPEAVAVKNHNPDKVWWAKNSQAKTIATESCPALQCCEGYRMCASFDSLPPCCCDINEGL

SEQ ID NO: 416 - protein, 140 aa, Homo Sapiens [sequence omitted]

SEQ ID NO: 417 - protein, 233 aa, Homo Sapiens
  SIGNAL -32..-1
MATPPFRLIRKMFSFKVSRWMGLACFRSLAASSPSIRQKKLMHKLQEEKAFREEMKIFREKIEDFREEMWTFRGKIHAFRGQILGFWEEERPFWEEEKTFWKEEKSFWEMEKSFREEEKTFWKKYRTFWKEDKAFWKEDNALWERDRNLLQEDKALWEEEKALWVEERALLEGEKALWEDKTSLWEEENALWEEERAFWMENNGHIAGEQMLEDGPHNANRGQRLLAFSRGRA

SEQ ID NO: 418 - protein, 83 aa, Homo Sapiens
  SIGNAL -29..-1
MSFFQLLMKRKELIPLVVFMTVAAGGASSFAVYSLWKTDVILDRKKNPEPWETVDPTVPQKLITINQQWKPIEELQNVQRVTK

SEQ ID NO: 419 - protein, 215 aa, Homo Sapiens [sequence omitted]

SEQ ID NO: 420 - protein, 417 aa, Homo Sapiens
  SIGNAL -20..-1
MMGSPVSHLLAGFCVWVVLGWVGGSVPNLGPAEQEQNHYLAQLFGLYGENGTLTAGGLARLLHSLGLGRVQGLRLGQHGPLTGRAASPAADNSTHRPQNPELSVDVWAGMPLGPSGWGDLEESKAPHLPRGPAPSGLDLLHRLLLLDHSLADHLNEDCLNGSQLLVNFGLSPAAPLTPRQFALLCPALLYQIDSRVCIGAPAPAPPGDLLSALLQSALAVLLLSLPSPLSLLLLRLLGPRLLRPLLGFLGALAVGTLCGDALLHLLPHAQEGRHAGPGGLPEKDLGPGLSVLGGLFLLFVLENMLGLLRHRGLRPRCCRRKRRNLETRNLDPENGSGMALQPLQAAPEPGAQGQREKNSQHPPALAPPGHQGHSHGHQGGTDITWMVLLGDGLHNLTDGLAIGAAFSDGFSAASVPP

SEQ ID NO: 421 - protein, 366 aa, Homo Sapiens
  SIGNAL -23..-1
MASMAAVLTWALALLSAFSATQARKGFWDYFSQTSGDKGRVEQIHQQKMAREPATLKDSLEQDLNNMNKFLEKLRPLSGSEAPRLPQDPVGMRRQLQEELEEVKARLQPYMAEAHELVGWNLEGLRQQLKPYTMDLMEQVALRVQELQEQLRVVGEDTKAQLLGGVDEAWALLQGLQSRVVHHTGRFKELFHPYAESLVSGIGRHVQELHRSVAPHAPASPARLSRCVQVLSRKLTLKAKALHARIQQNLDQLREELSRAFAGTGTEEGAGPDPQMLSEEVRQRLQAFRQDTYLQIAAFTRAIDQETEEVQQQLAPPPPGHSAFAPEFQQTDSGKVLSKLQARLDDLWEDITHSLHDQGHSHLGDP

SEQ ID NO: 422 - protein, 150 aa, Homo Sapiens
  SIGNAL -45..-1
MVLMWTSGDAFKTAYFLLKGAPLQFSVCGLLQVLVDLAILGQAYAFAPPPEAGAPRRAPHWHQGPLTVGRTRMWDRQPRALVGPDLPAGRVGAVAPAGVAEMGHGHWGLHQPLWGVSGWAVGVGLGRCLCSAGTARVDLAPRVLDVFRMT

SEQ ID NO: 423 - protein, 308 aa, Homo Sapiens
  SIGNAL -68..-1
MDFVAGAIGGVCGVAVGYPLDTVKVRIQTEPKYTGIWHCVRDTYHRERVWGFYRGLSLPVCTVSLVSSVSFGTYRHCLAHICRLRYGNPDAKPTKADITLSGCASGLVRVFLTSPTEVAKVRLQTQTQAQKQQRLLSASGPLAVPPMCPVPPACPEPKYRGPLHCLATVAREEGLCGLYKGSSALVLRDGHSFATYFLSYAVLCEWLSPAGHSRPDVPGVLVAGGCAGVLAWAVATPMDVIKSRLQADGQGQRRYRGLLHCMVTSVREEGPRVLFKGLVLNCCRAFPVNMVVFVAYEAVLRLARGLLT

SEQ ID NO: 424 - protein, 114 aa, Homo Sapiens
  SIGNAL -49..-1
MEKPLFPLVPLHWFGFGYTALVVSGGIVGYVKTGSVPSLAAGLLFGSLAGLGAYQLYQDPRNVWGFLAATSVTFVGVMGMRSYYYGKFMPVGLIAGASLLMAAKVGVRMLMTSD

SEQ ID NO: 425 - protein, 382 aa, Homo Sapiens
  SIGNAL -15..-1
MGLLLPLALCILVLCCGAMSPPQLALNPSALLSRGCNDSDVLAVAGFALRDINKDRKDGYVLRLNRVNDAQEYRRGGLGSLFYLTLDVLETDCHVLRKKAWQDCGMRIFFESVYGQCKAIFYMNNPSRVLYLAAYNCTLRPVSKKKIYMTCPDCPSSIPTDSSNHQVLEAATESLAKYNNENTSKQYSLFKVTRASSQWVVGPSYFVEYLIKESPCTKSQASSCSLQSSDSVPVGLCKGSLTRTHWEKFVSVTCDFFESQAPATGSENSAVNQKPTNLPKVEESQQKNTPPTDSPSKAGPRGSVQYLPDLDDKNSQEKGPQEAFPVHLDLTTNPQGETLDISFLFLEPMEEKLVVLPFPKEKARTAECPGPAQNASPLVLPP

SEQ ID NO: 426 - protein, 212 aa, Homo Sapiens
  SIGNAL -197..-1
  UNSURE -88: Xaa = Ala,Asp,Gly,Val
  UNSURE -109: Xaa = Asp,Glu
MATPNNLTPTNCSWWPISALESDAAKPAEAPDAPEAASPAHWPRESLVLYHWTQSFSSQKAKILEHDDVSYLKKILGELAMVLDQIEAXLEKRKLENEGQKCELWLCGCXFTLADVLLGATLHRLKFLGLSKKYWEDGSRPNLQSFFERVQRRFAFRKVLGDIHTTLLSAVIPNAFRLVKRKPPSFFGASFLMGSLGGMGYFAYWYLKKKYI

SEQ ID NO: 427 - protein, 287 aa, Homo Sapiens
  SIGNAL -26..-1
MGIQTSPVLLASLGVGLVTLLGLAVGSYLVRRSRRPQVTLLDPNEKYLLRLLDKTLSARSPGKHIYLSTRIDGSLVIRPYTPVTSDEDQGYVDLVIKVYLKGVHPKFPEGGKMSQYLDSLKVGDVVEFRGPSGLLTYTGKGHFNIQPNKKSPPEPRVAKKLGMIAGGTGITPMLQLIRAILKVPEDPTQCFLLFANQTEKDIILREDLEELQARYPNRFKLWFTLDHPPKDWAYSKGFVTADMIREHLPAPGDDVLVLLCGPPPMVQLACHPNLDKLGYSQKMRFTY

SEQ ID NO: 428 - protein, 312 aa, Homo Sapiens
  SIGNAL -25..-1
MSDLLLLGLIGGLTLLLLLTLLAFAGYSGLLAGVEVSAGSPPIRNVTVAYKFHMGLYGETGRLFTESCISPKLRSIAVYYDNPHMVPPDKCRCAVGSILSEGEESPSPELIDLYQKFGFKVFSFPAPSHVVTATFPYTTILSIWLATRRVHPALDTYIKERKLCAYPRLEIYQEDQIHFMCPLARQGDFYVPEMKETEWKWRGLVEAIDTQVDGTGADTMSDTSSVSLEVSPGSRETSAATLSPGASSRGWDDGDTRSEHSYSESGASGSSFEELDLEGEGPLGESRLDPGTEPLGTTKWLWEPTAPEKGKE

SEQ ID NO: 429 - protein, 226 aa, Homo Sapiens
  SIGNAL -29..-1
METVVIVAIGVLATIFLASFAALVLVCRQRYCRPRDLLQRYDSKPIVDLIGAMETQSEPSELELDDVVITNPHIEAILENEDWIEDASGLMSHCIAILKICHTLTEKLVAMTMGSGAKMKTSASVSDIIVVAKRISPRVDDVVKSMYPPLDPKLLDARTTALLLSVSHLVLVTRNACHLTGGLDWIDQSLSAAEEHLEVLREAALASEPDKGLPGPEGFLQEQSAI

SEQ ID NO: 430 - protein, 406 aa, Homo Sapiens
  SIGNAL -35..-1
MRGSVECTWGWGHCAPSPLLLWTLLLFAAPFGLLGEKTRQVSLEVIPNWLGPLQNLLHIRAVGTNSTLHYVWSSLGPLAVVMVATNTPHSTLSVNWSLLLSPEPDGGLMVLPKDSIQFSSALVFTRLLEFDSTNVSDTAAKPLGRPYPPYSLADFSWNNITDSLDPATLSATFQGHPMNDPTRTFANGSLAFRVQAFSRSSRPAQPPRLLHTADTCQLEVALIGASPRGNRSLFGLEVATLGQGPDCPSMQEQHSIDDEYAPAVFQLDQLLWGSLPSGFAQWRPVAYSQKPGGRESALPCQASPLHPALAYSLPQSPIVRAFFGSQNNFCAFNLTFGASTGPGYWDQHYLSWSMLLGVGFPPVDGLSPLVLGIMAVALGAPGLMLLGGGLVLLLHHKKYSEYQSIN

SEQ ID NO: 431 - protein, 120 aa, Homo Sapiens
  SIGNAL -57..-1
MMPSRTNLATGIPSSKVKYSRLSSTDDGYIDLQFKKTPPKIPYKAIALATVLFLIGAFLIIIGSLLLSGYISKGGADRAVPVLIIGILVFLPGFYHLRIAYYASKGYRGYSYDDIPDFDD

SEQ ID NO: 432 - protein, 210 aa, Homo Sapiens
  SIGNAL -36..-1
MALPQMCDGSHLASTLRYCMTVSGTVVLVAGTLCFAWWSEGDATAQPGQLAPPTEYPVPEGPSPLLRSVSFVCCGAGGLLLLIGLLWSVKASIPGPPRWDPYHLSRDLYYLTVESSEKESCRTPKVVDIPTYEEAVSFPVAEGPPTPPAYPTEEALEPSGSRDALLSTQPAWPPPSYESISLALDAVSAETTPSATRSCSGLVQTARGGS

SEQ ID NO: 433 - protein, 251 aa, Homo Sapiens
  SIGNAL -243..-1
MAHRLQIRLLTWDVKDTLLRLRHPLGEAYATKARAHGLEVEPSALEQGFRQAYRAQSHSFPNYGLSHGLTSRQWWLDVVLQTFHLAGVQDAQAVAPIAEQLYKDFSHPCTWQVLDGAEDTLRECRTRGLRLAVISNFDRRLEGILEGLGLREHFDFVLTSEAAGWPKPDPRIFQEALRLAHMEPVVAAHVGDNYLCDYQGPRAVGMHSFLVVGPQALDPVVRDSVPKEHILPSLAHLLPALDCLEGSTPGL

SEQ ID NO: 434 - protein, 126 aa, Homo Sapiens
  SIGNAL -24..-1
MDKSLLLELPILLCCFRALSGSLSMRNDAVNEIVAVKNNFPVIEIIQCRMCHLQFPGEKCSRGRGICTATTEEACMVGRMFKRDGNPWLTFMGCLKNCADVKGIRWSVYLVNFRCCRSHDLCNEDL

SEQ ID NO: 435 - protein, 133 aa, Homo Sapiens [sequence omitted]

SEQ ID NO: 436 - protein, 221 aa, Homo Sapiens
  SIGNAL -28..-1
MEAGGFLDSLIYGACVVFTLGMFSAGLSDLRHMRMTRSVDNVQFLPFLTTEVNNLGWLSYGALKGDGILIVVNTVGAALQTLYILAYLHYCPRKRVVLLQTATLLGVLLLGYGYFWLLVPNPEARLQQLGLFCSVFTISMYLSPLADLAKVIQTKSTQCLSYPLTIATLLTSASWCLYGFRLRDPYIMVSNFPGIVTSFIRFWLFWKYPQEQDRNYWLLQT

SEQ ID NO: 437 - protein, 352 aa, Homo Sapiens
  SIGNAL -23..-1
MESGGRPSLCQFILLGTTSVVTAALYSVYRQKARVSQELKGAKKVHLGEDLKSILSEAPGKCVPYAVIEGAVRSVKETLNSQFVENCKGVIQRLTLQEHKMVWNRTTHLWNDCSKIIHQRTNTVPFDLVPHEDGVDVAVRVLKPLDSVDLGLETVYEKFHPSIQSFTDVIGHYISGERPKGIQETEEMLKVGATLTGVGELVLDNNSVRLQPPKQGMQYYLSSQDFDSLLQRQESSVRLWKVLALVFGFATCATLFFILRKQYLQRQERLRLKQMQEEFQEHEAQLLSRAKPEDRESLKSACVVCLSSFKSCVFLECGHVCSCTECYRALPEPKKCPICRQAITRVIPLYNS

SEQ ID NO: 438 - protein, 385 aa, Homo Sapiens
  SIGNAL -184..-1
MWTFSYIGFPVELNTVYFIGAHKIPNANMNEDGPSMSVNFTSPGCLDHIMKYKKKCVKAGSLWDPNITACKKNEETVEVNFTTTPLGNRYMALIQHSTIIGFSQVFEPHQKKQTRASVVIPVTGDSEGATVQLTPYFPTCGSDCIRHKGTVVLCPQTGVPFPLDNNKSKPGGWLPLLLLSLLVATWVLVAGIYLMWRHERIKKTSFSTTTLLPPIKVLVVYPSEICFHHTICYFTEFLQNHCRSEVILEKWQKKKIAEMGPVQWLATQKKAADKVVFLLSNDVNSVCDGTCGKSEGSPSENSQDLFPLAFNLFCSDLRSQIHLHKYVVVYFREIDTKDDYNALSVCPKYHLMKDATAFCAELLHVKQQVSAGKRSQACHDGCCSL

SEQ ID NO: 439 - protein, 69 aa, Homo Sapiens
  SIGNAL -23..-1
MNLMWTLLLFLLLDVTVFIPALPFSTRHIDNPRSWVPRGHHRYCDVMMRRRWLIYRGKCEQIHTFIHRI

SEQ ID NO: 440 - protein, 108 aa, Homo Sapiens
  SIGNAL -49..-1
MNKTHKDCSSPQYSIYNILNELPTRPIILSCSQISCLLLVSTWSADLMSYRPVTKPSQRCTSPAQSMTVNLTKDVGFYEDTQSIRITLSEISQAQKDTYFIISCICGI

SEQ ID NO: 441 - protein, 108 aa, Homo Sapiens [sequence omitted]

SEQ ID NO: 442 - protein, 125 aa, Homo Sapiens
  SIGNAL -37..-1
MVCEDAPSFQMAWESQMAWERGPALLCCVLSASQLSSQDQDPLGHIKSLLYPFGFPVELPRPGPTGAYKKVKNQNQTTSSELLRKQTSHFNQRGHRARSKLLASRQIPDRTFKCGKWLPQVPSPV

SEQ ID NO: 443 - protein, 169 aa, Homo Sapiens [sequence omitted]

SEQ ID NO: 444 - protein, 82 aa, Homo Sapiens [sequence omitted]

SEQ ID NO: 445 - protein, 251 aa, Homo Sapiens
  SIGNAL -20..-1
MDKVQSGFLILFLFLMECQLHLCLPYADGLHPTGNITGLPGSFNHWFYVTQGELKSCFRGDKKKVITFHRKKFSFQGSKRSQPPRNITKEPKVFFHKTQLPGIQGAASRSTAASPTNPMKFLRNKAIIRHRPALVKVILISSVAFSIALICGMAISYMIYRLAQAEERQQLESLYKNLRIPLLGDEEEGSEDEGESTHLLPKNENELEKFIHSVIISKRSKNIKKKLKEEQNSVTENKTKNASHNGKMEDL

SEQ ID NO: 446 - protein, 305 aa, Homo Sapiens
  SIGNAL -34..-1
MSFLRITPSTHSSVSSGLLRLSIFLLLSFPDSNGKAIWTAHLNITFQVGNEITSELGESGVFGNHSPLERVSGVVALPEEWNQNACHPLTNFSRPKQADSWLALIERGGCTFTHKINVAAEKGANGVIIYNYQGTGSKVFPMSHQGTENIVAVMISNLKGMEILHSIQKGVYVTVIIEVGRMHMQWVSHYIMYLFTFLAATIAYFYLDCVWRLTPRVPNSFTRRRSQIKTDVKKAIDQLQLRVLKEGDEELDLNEDNCVVCFDTYKPQDVVRILTCKHFFHKACIDPWLLAHRTCPMCKCDILKT

SEQ ID NO: 447 - protein, 61 aa, Homo Sapiens
  SIGNAL -42..-1
MTDLDLMINFTFPIQWVNQNRMAYYSLKPLLPCSSVLTCGQASQDLLTSATSVTGMEKIEA

SEQ ID NO: 448 - protein, 113 aa, Homo Sapiens
  SIGNAL -15..-1
MNFYLLLASSILCALIVFWKYRRFQRNTGEMSSNSTALALVRPSSSGLINSNTDNNLAVYDLSRDILNNFPHSIARQKRILVNLSMVENKLVELEHTLLSKGFRGASPHRKST

SEQ ID NO: 449 - protein, 101 aa, Homo Sapiens
  SIGNAL -30..-1
MERPRSPQCSAPASASASVTLAQLLQLVQQGQELPGLEKRHIAAIHGEPTASRLPRRPKPWEAAALAESLPPPTLRIGTAPAEPGLVEAATAPSSWHTVGP

SEQ ID NO: 450 - protein, 97 aa, Homo Sapiens
  SIGNAL -90..-1
  UNSURE -39: Xaa = His,Gln
MNQENPPPYPGPGPTAPYPPYPPQPMGPGPMGGPYPPPQGYPYQGYLQYGWXGGPQEPPKTTVYVVEDQRRDELGPSTCLTACWTALCCCCLWDMLT

SEQ ID NO: 451 - protein, 101 aa, Homo Sapiens
  SIGNAL -25..-1
MVDRELADIHEDAKTCLVLCSRVLSVISVKEIKTQLSLGRHPIISNWFDYIPSTRYKDPCELLHLCRLTIRNQLLTNNMLPDGIFSLLIPARLQNYLNLEI

SEQ ID NO: 452 - protein, 152 aa, Homo Sapiens
  SIGNAL -101..-1
MDNVQPKIKHRPFCFSVKGHVKMLRLALTVTSMTFFIIAQAPEPYIVITGFEVTVILFFILLYVLRLDRLMKWLFWPLLDIINSLVTTVFMLIVSVLALIPETTTLTVGGGVFALVTAVCCLADGALIYRKLLFNPSGPYQKKPVHEKKEVL

SEQ ID NO: 453 - protein, 209 aa, Homo Sapiens
  SIGNAL -86..-1
MLSPTFVLWDVGYPLYTYGSICIIALIIWQVKKSCQKLSLVPNRSCCRCHRRVQQKSGDRTSRARRTSQEEAEKLWKLLFLMKSQGWIPQEGSVRRILCADPCCQICNVMALEIKQLLAEAPEVGLDNKMKLFLHWINPEMKDRRHEESILLSKAETVTQDRTKNIEKSPTVTKDHVWGATTQKTTEDPEAQPPSTEEEGLIFCDAPSA

SEQ ID NO: 454 - protein, 89 aa, Homo Sapiens
  SIGNAL -21..-1
MGSCSGRCALVVLCAFQLVAALERQVFDFLGYQWAPILANFVHIIIVILGLFGTIQYRLRYVMCTRCGQPSGSPGTSSSSASTWKSVAS

SEQ ID NO: 455 - protein, 66 aa, Homo Sapiens; identical to SEQ ID NO: 414
  SIGNAL -19..-1

SEQ ID NO: 456 - protein, 155 aa, Homo sapiens
  SIGNAL -31..-1
MFTSTGSSGLYKAPLSKSLLLVPSALSLLLALLLPHCQKPFVYDLHAVKNDFQIWRLICGRIICLDLKDTFCSSLLIYNFRIFERRYGSRKFASFLLGTWVLSALFDFLLIEAMQYFFGITAASNLPSGLIFCCAFCSETKLFLSRQAMAENFSI

SEQ ID NO: 457 - protein, 55 aa, Homo sapiens
MADFYKEFLSKNFQKRMYYNRDWYKRNFAITFFMGKVALERIWNKLKQKQKKRSN

SEQ ID NO: 458 - protein, 67 aa, Homo sapiens
  SIGNAL -20..-1
MSRNLRTALIFGGFISLIGAAFYPIYFRPLMRLEEYKKEQAINRAGIVQEDVQPPGLKVWSDPFGRK

SEQ ID NO: 459 - protein, 198 aa, Homo sapiens
  SIGNAL -21..-1
MPVPALCLLWALAMVTRPASAAPMGGPELAQHEELTLLFHGTLQLGQALNGVYRTTEGWLTKARNSLGLYGRTIELLGQEVSRGRDAAQELRASLLETQMEEDILQLQAEATAEVLGEVAQAQKVLRDSVQRLEVQLRSAWLGPAYREFEVLKAHADKQSHILWALTGHVQRQRREMVAQQHRLRQIQERLHTAALPA

SEQ ID NO: 460 - protein, 135 aa, Homo sapiens
  SIGNAL -25..-1
  misc_feature (39): unknown
MSLRNLWRDYKVLVVMVPLVGLIHLGWYRIKSSPVFQIPKNDDIPEQDSLGLSNLQKSQIQGKXAGLQSSGKEAALNLSFISKEEMKNTSWIRKNWLLVAGISFIGDHLGTYFLQRSAKQSVKFQSQSKQKSIEE

SEQ ID NO: 461 - protein, 255 aa, Homo sapiens
  SIGNAL -70..-1
MQQKEQQFREWFLKEFPQIRWKIQESIERLRVIANEIEKVHRGCVIANVVSGSTGILSVIGVMLAPFTAGLSLSITAAGVGLGIASATAGIASSIVENTYTRSAELTASRLTATSTDQLEALRDILHDITPNVLSFALDFDEATKMIANDVHTLRRSKATVGRPLIAWRYVPINVVETLRTRGAPTRIVRKVARNLGKATSGVLVVLDVVNLVQDSLDLHKGEKSESAELLRQWAQELEENLNELTHIHQSLKAG

SEQ ID NO: 462 - protein, 59 aa, Homo sapiens
  SIGNAL -49..-1
MPGTEVLEGATDGLAAINLLKWIKTLGGSVISMIVLLICVVCLYIVCRCGSHLWRESHH

SEQ ID NO: 463 - protein, 180 aa, Homo sapiens
MCISGLCQIVGCDHQLGSTVKEDNCGVCNGDGSTCRLVRGQYKSQLSATKSDDTVVAIPYGSRHIRLVLKGPDHLYLETKTLQGTKGENSLSSTGTFLVDNSSVDFQKFPDKEILRMAGPLTADFIVKIRNSGSADSTVQFIFYQPIIHRWRETDFFPCSATCGGGYQLTSAECYDLRSN

SEQ ID NO: 464 - protein, 162 aa, Homo sapiens
  SIGNAL -23..-1
MGDKIWLPFPVLLLAALPPVLLPGAAGFTPSLDSDFTFTLPAGQKECFYQPMPLKASLEIEYQVLDGAGLDIDFHLASPEGKTLVFEQRKSDGVHTVETEVGDYMFCFDNTFSTISEKVIFFELIPDNMGEQAQEQEDWKKYITGTDILDMKLEDILVSMVF

SEQ ID NO: 465 - protein, 120 aa, Homo sapiens
  SIGNAL -23..-1
MGDKIWLPFPVLLLAALPPVLLPGAAGFTPSLDSDFTFTLPAGQKECFYQPMPLKASLEIEYQVLDGAGLDIDFHLASPEGKTLVFEQRKSDGVHTCIRSKNGPGTAVHAYNPSTFRGQV

SEQ ID NO: 466 - protein, 7 aa, Homo sapiens
MVEMTGV

SEQ ID NO: 467 - protein, 199 aa, Homo sapiens
  SIGNAL -42..-1
MDGQKKNWKDKVVDLLYWRDIKKTGVVFGASLFLLLSLTVFSIVSVTAYIALALLSVTISFRIYKGVIQAIQKSDEGHPFRAYLESEVAISEELVQKYSNSALGHVNCTIKELRRLFLVDDLVDSLKFAVLMWVFTYVGALFNGLTLLILALISLFSVPVIYERHQAQIDHYLVLANKNVKDAMAKIQAKIPGLKRKAE

SEQ ID NO: 468 - protein, 43 aa, Homo sapiens
MPFRMSGYIPFGTPIVSVTFKGFPFLKNYFKCLTLCYCSRVFD

SEQ ID NO: 469 - protein, 50 aa, Homo sapiens
  SIGNAL -37..-1
MEWAGKQRDFQVRAAPGWDHLASFPGPSLRLFSGSQASVCSLCSGFGAQE

SEQ ID NO: 470 - protein, 153 aa, Homo sapiens [sequence omitted]

SEQ ID NO: 471 - protein, 67 aa, Homo sapiens
MRQKRKGDLSPAKLMMLTIGDVIKQLIEAHEQGKDIDLNKVRTKTAAKYGLSAQPRLVDIIAAVPPE

SEQ ID NO: 472 - protein, 87 aa, Homo sapiens [sequence omitted]

SEQ ID NO: 473 - protein, 250 aa, Homo sapiens
  SIGNAL -85..-1
  misc_feature (-30): unknown
MSAEVKVTGQNQEQFLLLAKSAKGAALATLIHQVLEAPGVYVFGELLDMPNVRELXARNLPPLTEAQKNKLRHLSVVTLAAKVKCIPYAVLLEALALRNVRQLEDLVIEAVYADVLRGSLDQRNQRLEVDYSIGRDIQRQDLSAIARTLQEWCVGCEVVLSGIEEQVSRANQHKEQQLGLKQQIESEVANLKKTIKVTTAAAAAATSQDPEQHLTELREPAPGTNQRQPSKKASKGKGLRGSAKIWSKSN

SEQ ID NO: 474 - protein, 24 aa, Homo sapiens
MPTNCAAAGCATTYNKHINISFHR

SEQ ID NO: 475 - protein, 228 aa, Homo sapiens
MPTNCAAAGCATTYNKHINISFHRFPLDPKRRKEWVRLVRRKNFVPGKHTFLCSKHFEASCFDLTGQTRRLKMDAVPTIFDFCTHIKSMKLKSRNLLKKNNSCSPAGPSSLKSNISSQQVLLEHSYAFRNPMEAKKRIIKLEKEIASLRRKMKTCLQKERRATRRWIKAMCLVKNLEANSVLPKGTSEHMLPTALSSLPLEDFKILEQDQQDKTLLSLNLKQTKSTFI

SEQ ID NO: 476 - protein, 86 aa, Homo sapiens
  SIGNAL -20..-1
MNLHFPQWFVHSSALGLVLAPPFSSPGTDPTFPCIYCRLLNMIMTRLAFSFITCLCPNLKEVCLILPEKNCNSRHAGFVGPAKLRQ

SEQ ID NO: 477 - protein, 44 aa, Homo sapiens
MSPRLECSGAILAHCNPRLPGSSYSPASATWVRGSLEPGRLRLQ

SEQ ID NO: 478 - protein, 314 aa, Homo sapiens
  SIGNAL -58..-1
MQNVINTVKGKALEVAEYLTPVLKESKFRETGVITPEEFVAAGDHLVHHCPTWQWATGEELKVKAYLPTGKQFLVTKNVPCYKRCKQMEYSDELEAIIEEDDGDGGWVDTYHNTGITGITEAVKEITLENKDNIRLQDCSALCEEEEDEDEGEAADMEEYEESGLLETDEATLDTRKIVEACKAKTDAGGEDAILQTRTYDLYITYDKYYQTPRLWLFGYDEQRQPLTVEHMYEDISQDHVKKTVTIENHPHLPPPPMCSVHPCRHAEVMKKIIETVAEGGGELGVHMYLLIFLKFVQAVIPTIEYDYTRHFTM

SEQ ID NO: 479 - protein, 89 aa, Homo sapiens [sequence omitted]

SEQ ID NO: 480 - protein, 98 aa, Homo sapiens [sequence omitted]

SEQ ID NO: 481 - protein, 92 aa, Homo sapiens
  SIGNAL -36..-1
MLVTQGLVYQGYLAANSRFGSLPKVALAGLLGFGLGKVSYIGVCQSKFHFFEDQLRGAGFGPQHNRHCLLTCEECKIKHGLSEKGDSQPSAS

SEQ ID NO: 482 - protein, 351 aa, Homo sapiens
  SIGNAL -16..-1
MVPFIYLQAHFTLCSGWSSTYRDLRKGVYVPYTQGKWEGELGTDLVSIPHGPNVTVRANIAAITESDKFFINGSNWEGILGLAYAEIARPDDSPEPFFDSLVKQTHVPNLFSLQLCGAGFPLNQSEVLASVGGSMIIGGIDHSLYTGSLWYTPIRREWYYEVIIVRVEINGQDLKMDCKEYNYDKSIVDSGTTNLRLPKKVFEAAVKSIKAASSTEKFPDGFWLGEQLVCWQAGTTPWNIFPVISLYLMGEVTNQSFRITILPQQYLRPVEDVATSQDDCYKFAISQSSTGTVMGAVIMEGFYVVFDRARKRIGFAVSACHVHDEFRTAAVEGPFCHLGHGRLWLQHSTDR

SEQ ID NO: 483 - protein, 138 aa, Homo sapiens
  SIGNAL -47..-1
MEKFVDPGNHNSGIDLLRTYLWRCQFLLPFVSLGLMCFGALIGLCACICRSLYPTIATGILHLLAGLCTLGSVSCYVAGIELLHQKLELPDNVSGEFGWSFCLACVSAPLQFMASALFIWAAHTNRREYTLMKAYRVA

SEQ ID NO: 484 - protein, 101 aa, Homo sapiens
  SIGNAL -73..-1
MNLERVSNEEKLNLCRKYYLGGFAFLPFLWLVNIFWFYREAFLVPAYTEQSQIKGYVWRSAVGFLFWVIVLTSWITIFQIYRPRWGALGDYLSFTIPLGTP

SEQ ID NO: 485 - protein, 252 aa, Homo sapiens
  SIGNAL -68..-1
MPEGPELHLASQFVNEACRALVFGGCVEKSSVSRNPEVPFESSAYRISASARGKELRLILSPLPGAQPQQEPLALVFRFGMSGSFQLVPREELPRHAHLRFYTAPPGPRLALCFVDIRRFGRWDLGGKWQPGRGPCVLQEYQQFRENVLRNLADKAFDRPICEALLDQRFFNGIGNYLRAEILYRLKIPPFEKARSVLEALQQHRPSPELTLSQKIRTKLQNSDLLELCHSVPKEVVQLGEAKDGSNLCFSK

SEQ ID NO: 486 - protein, 350 aa, Homo sapiens
  SIGNAL -68..-1
MPEGPELHLASQFVNEACRALVFGGCVEKSSVSRNPEVPFESSAYRISASARGKELRLILSPLPGAQPQQEPLALVFRFGMSGSFQLVPREELPRHAHLRFYTAPPGPRLALCFVDIRRFGRWDLGGKWQPGRGPCVLQEYQQFRLKIPPFEKARSVLEALQQHRPSPELTLSQKIRTKLQNPDLLELCHSVPKEVDQLGGRGYGSESGEEDFAAFRAWLRCYGMPGMSSLQDRHGRTIWFQGDPGPLAPKGRKSRKKKSKATQLSPEDRVEDALPPSKAPSKTRRAKRDLPKRTATQRPEGTSLQQDPEAPTVPKKGRRKGRQAASGHCRPRKVKADIPSLEPEGTSAS

SEQ ID NO: 487 - protein, 390 aa, Homo sapiens [sequence omitted]

SEQ ID NO: 488 - protein, 190 aa, Homo sapiens
  SIGNAL -82..-1
MYVWPCAVVLAQYLWFHRRSLPGKAILEIGAGVSLPGILTAKCGAEVILSDSSELPHCLEVCRQSCQMNNLPHLQVVGLTWGHISWDLLALPPQDIILASDVFFEPEDFEDILATIYFLMHKNPKVQLWSTYQVRSADWSLEALLYKWDMKCVHIPLESFDADKEDIAESTLPGRHTVEMLVISFAKDSL

SEQ ID NO: 489 - protein, 285 aa, Homo sapiens
  SIGNAL -232..-1
MGCVFQSTEDKRIFKIDWTLSPGEHAKDEYVLYYYSNLSVPIGRFQNRVHLMGDNLCNDGSLLLQDVQEADQGTYICEIRLKGESQVFKKAVVLHVLPEEPKELMVHVGGLIQMGCVFQSTEVKHVTKVEWIFSGRRAKEEIVFRYYHKLRMSAEYSQSWGHFQNRVNLVGDIFRNDGSIMLQGVRESDGGNYTCSIHLGNLVFKKTIVLHVSPEEPRTLVTPAALRPLVLGGNQLVIIVGIVCATILLLPVLILIVKKTCGNKSSVNSTVLVKNTKKTNPKKKK

SEQ ID NO: 490 - protein, 153 aa, Homo sapiens
MGCVFQSTVDKCIFKIDWTLSPGEHAKDEYVLYYYSNLSVPIGRFQNRVHLMGDILCNDGSLLLQDVQEADQGTYICEIRLKGESQVFKKAVVLHVLPEEPKELMVHVGGLIQMGCVFQSTEVKHVTKVEWIFSGRRAKVTRRKHHCVREGSG

SEQ ID NO: 491 - protein, 49 aa, Homo sapiens
  misc_feature (3): unknown
MLXGDHRALLLKIWLLQRPESQEGLLPGRLVVMERRVKMTSCPSCPRFC

SEQ ID NO: 492 - protein, 99 aa, Homo sapiens
  SIGNAL -24..-1
MKSAKLGFLLRFFIFCSLNTLLLGGVNKIAEKICGDLKDPCKLDMNFGSCYEVHFRYFYNRTSKRCETFVFSGCNGNLNNFKLKIEREVACVAKYKPPR

SEQ ID NO: 493 - protein, 95 aa, Homo sapiens [sequence omitted]

SEQ ID NO: 494 - protein, 121 aa, Homo sapiens
  SIGNAL -23..-1
MMLPQWLLLLFLLFFFLFLLTRGSLSPTKYNLLELKESCIRNQDCETGCCQRAPDNCESHCAEKGSEGSLCQTQVFFGQYRACPCLRNLTCIYSKNEKWLSIAYGRCQKIGRQKLAKKMFF

SEQ ID NO: 495 - protein, 59 aa, Homo sapiens
MILCFLLPHHRLQEARQIQVLKMLPREKLRRREERKQINGKKERTKYETPRKREGKKKK

SEQ ID NO: 496 - protein, 86 aa, Homo sapiens
  SIGNAL -14..-1
MVALNLILVPCCAAWCDPRRIHSQDDVPRSSAADTGSAMQRREAWAGWRRSQPFSVGLPSAERLENQPGKLSWRSLVGEGYRICDL

SEQ ID NO: 497 - protein, 165 aa, Homo sapiens
  SIGNAL -58..-1
MTRLCLPRPEAREDPIPVPPRGLGAGEGSGSPVRPPVSTWGPSWAQLLDSVLWLGALGLTIQAVFSTTGPALLLLLVSFLTFDLLHRPAGHTLPQRKLLTRGQSQGAGEGPGQQEALLLQMGTVSGQLSLQDALLLLLMGLGPLLRACGMPLTLLGLAFCLHPWA

SEQ ID NO: 498 - protein, 80 aa, Homo sapiens
  SIGNAL -35..-1
MPFQFGTQPRRFPVEGGDSSIELEPGLSSSAACNGKEMSPTRQLRRCPGSHCLTITDVPVTVYATTRKPPAQSSKEMHPK

SEQ ID NO: 499 - protein, 73 aa, Homo sapiens
  SIGNAL -21..-1
MAPQTLLPVLVLCVLLLQAQGGYRDKMRMQRIKVCEKRPSIDLCIHHCSCFQKCETNKICCSAFCGNICMSIL

SEQ ID NO: 500 - protein, 98 aa, Homo sapiens [sequence omitted]

SEQ ID NO: 501 - protein, 112 aa, Homo sapiens
  SIGNAL -21..-1
MESRVLLRTFCLIFGLGAVWGLGVDPSLQIDVLTELELGESTTGVRQVPGLHNGTKAFLFQDTPRSIKASTATAEQFFQKLRNKHEFTILVTLKQTHLNSGVILSIHHLDHR

SEQ ID NO: 502 - protein, 70 aa, Homo sapiens
  SIGNAL -44..-1
MCCYCRIFCLRCTYFPVHCGMCNLRYFEFSTFLLSLSLITYCFWDPPHRGSHSLSLEHTPLDFLEWGLLR

SEQ ID NO: 503 - protein, 92 aa, Homo sapiens
  SIGNAL -13..-1
MLFSLSLLSNLNQIGSSHLDRPHIPGQSAQLFIYQMSSQQLQQQPSANKKAGKIHNTPFANQLNPTQHLAKPFQQILPGRQSGSLTSPFLAC

SEQ ID NO: 504 - protein, 207 aa, Homo sapiens
  SIGNAL -42..-1
MHILQLLTTVDDGIQAIVHCPDTGKDIWNLLFDLVCHEFCQSDDPPIILQEQKTVLASVFSVLSAIYASQTEQEYLKIEKVDLPLIDSLIRVLQNMEQCQKKPENSAESNTEETKRTDLTQDDLHLKILKDILCEFLSNIFQALTKETVAQGVKEGQLSKQKCSSAFQNLLPFYSPVVEDFIKILREVDKALADDLEKNFPSLKVQT

SEQ ID NO: 505 - protein, 201 aa, Homo sapiens
MQVALKEDLDALKEKFRTMESNQKSSFQEIPKLNEELLSKQKQLEKIESGEMGLNKVWINITEMNKQISLLTSAVNHLKANVKSAADLISLPTTVEGLQKSVASIGNTLNSVHLAVEALQKTVDEHKKTMELLQSDMNQHFLKETPGSNQIIPSPSATSELDNKTHSENLKQMGDRSATLKRQSLDQVTNRTDTVKIQKKK

SEQ ID NO: 506 - protein, 379 aa, Homo sapiens
  SIGNAL -37..-1
MPHSSLHPSIPCPRGHGAQKAALVLLSACLVTLWGLGEPPEHTLRYLVLHLASLQLGLLLNGVCSLAEELRHIHSRYRGSYWRTVRACLGCPLRRGALLLLSIYFYYSLPNAVGPPFTWMLALLGLSQALNILLGLKGLAPAEISAVCEKGNFNVAHGLAWSYYIGYLRLILPELQARIRTYNQHYNNLLRGAVSQRLYILLPLDCGVPDNLSMADPNIRFLDKLPQQTGDRAGIKDRVYSNSIYELLENGQRAGTCVLEYATPLQTLFAMSQYSQAGFSREDRLEQAKLFCRTLEDILADAPESQNNCRLIAYQEPADDSSFSLSQEVLRHLRQEEKEEVTVGSLKTSAVPSTSTMSQEPELLLSGMGKPLPLRTDFS

SEQ ID NO: 507 - protein, 112 aa, Homo sapiens
MPSEGRCWETLKALRSSDKGRLCYYRDWLLRREDVLEECMSLPKLSSYSGWVVEHVLPHMQENQPLSETSPSSTSASALDQPSFVPKSPDASSAFSPASPATPNGTKGKKKK

SEQ ID NO: 508 - protein, 43 aa, Homo sapiens
SLPQALWFQFFYHSGSSLESPGMLNGPFQHRNSRIMTHRSAEK

SEQ ID NO: 509 - protein, 51 aa, Homo sapiens
  SIGNAL -16..-1
MLRIALTLIPSMLSRAAGWCWYKEPTQQFSYLCLPCLSWNKKGNVLQLPNF

SEQ ID NO: 510 - protein, 244 aa, Homo sapiens
  SIGNAL -18..-1
MANPKLLGLELSEAEAIGADSARFEELLLQASKELQQAQTTRPESTQIQPQPGFCIKTNSSEGKVFINICHSPSIPPPADVTEEELLQMLEEDQAGFRIPMSLGEPHAELDAKGQGCTAYDVAVNSDFYRRMQNSDFLRELVITIAREGLEDIYNLQLNPEWRMMKNRPFMGSISQQNIRSEQRPRIQELGDLYTPAPGRAESGPEKPHLNLWLEAPDLLLAEVDLPKLDGALGLSLEIGRTAW

SEQ ID NO: 511 - protein, 353 aa, Homo sapiens
  SIGNAL -34..-1
MERGLKSADPRDGTGYTGWAGIAVLYLHLYDVFGDPAYLQLAHGYVKQSLNCLTKRSITFLCGDAGPLAVAAVLYHKMNNEKQAEDCITRLIHLNKIDPHAPNEMLYGRIGYIYALLFVNKNFGVEKTPQSHIQQICETILTSGENLARKRNFTAKSPLMYEWYQEYYVGAAHGLAGIYYYLMQPSLQVSQGKLHSLVKPSVDYVCQLKFPSGNYPPCIGDNRDLLVHWCHGAPGVIYMLIQAYKVFREEKYLCDAYQCADVIWQYGLLKKGYGLCHGSAGNAYAFLTLYNLTQDMKYLYRACKFAEWCLEYGEHGCRTPDTPFSLFEGMAGTIYFLADLLVPTKARFPAFEL

SEQ ID NO: 512 - protein, 30 aa, Homo sapiens
MQMDTFFMSEKHTHTHTHIHTHTRKTKKKK

SEQ ID NO: 513 - protein, 112 aa, Homo sapiens
  SIGNAL -48..-1
MQDTGSVVPLHWFGFGYAALVASGGIIGYVKAGSVPSLAAGLLFGSLAGLGAYQLSQDPRNVWVFLATSGTLAGIMGMRFYHSGKFMPAGLIAGASLLMVAKVGVSMFNRPH

SEQ ID NO: 514 - protein, 54 aa, Homo sapiens
EIAGYGAEGFSSVLGYPRWHRLPPQSLQHHQYCQRRWPDRRCLQSHTQSSGHLP

SEQ ID NO: 515 - protein, 151 aa, Homo sapiens
  SIGNAL -21..-1
  misc_feature (-14, 46): unknown
MAASTSMXPVAVTAAVAPVLSINSDFSDLREIKKQLLLIAGLTRERGLLHSSKWSAELAFSLPALPXGQLQPPPPITEEDAQDMDAYTLAKAYFDVKEYDRAAHFLHGCNSKKAYFLYMYSRYLVRAILKCHSAFSETSIFRTNGKVKSFK

SEQ ID NO: 516 - protein, 228 aa, Homo sapiens
  SIGNAL -25..-1
MSMAVETFGFFMATVGLLMLGVTLPNSYWRVSTVHGNVITTNTIFENLWFSCATDSLGVYNCWEFPSMLALSGYIQACRALMITAILLGFLGLLLGIAGLRCTNIGGLELSRKAKLAATAGAPHILAGICGMVAISWYAFNITRDFFDPLYPGTKYELGPALYLGWSASLISILGGLCLCSACCCGSDEDPAASARRPYQAPVSVMPVATSDQEGDSSFGKYGRNAYV

SEQ ID NO: 517 - protein, 64 aa, Homo sapiens
  SIGNAL -47..-1
MHGFEIISLKEESPLGKVSQGPLFNVTSGSSSPVTWLGLLSFQNLHCFPDLPTEMPLRAKGVNT

SEQ ID NO: 518 - protein, 146 aa, Homo sapiens
  SIGNAL -31..-1
MMWQKYAGSRRSMPLGARILFHGVFYAGGFAIVYYLIQKFHSRALYYKLAVEQLQSHPEAQEALGPPLNIHYLKLIDRENFVDIVDAKLKIPVSGSKSEGLLYVHSSRGGPFQRWHLDEVFLELKDGQQIPVFKLSGENGDEVKKE

SEQ ID NO: 519 - protein, 87 aa, Homo sapiens [sequence omitted]

SEQ ID NO: 520 - protein, 40 aa, Homo sapiens
  SIGNAL -27..-1
MRTLFGAVRAPFSSLTLLLITPSPSPLLFDRGLSLRSAMS

SEQ ID NO: 521 - protein, 154 aa, Homo sapiens
MGSLSGLRLAAGSCFRLCERDVSSSLRLTRSSDLKRINGFCTKPQESPGAPSRTYNRVPLHKPTDWQKKILIWSGRFKKEDEIPETVSLEMLDAAKNKMRVKSSYLMIALTVVGCIFMVIEGKKAAQRHETLTSLNLEKKARLKEEAAMKAKTE

SEQ ID NO: 522 - protein, 101 aa, Homo sapiens
MVCEKCEKKLGTVITPDTWKDGARNTTESGGRKLNKNKALTSKKARFDPYGKNKFSTCRICKSSVHQPGSHYCQGCAYKKGICAMCGKKVLDTKNYKQTSV

SEQ ID NO: 523 - protein, 456 aa, Homo sapiens
  SIGNAL -22..-1
MFEEPEWAEAAPVAAGLGPVISRPPPAASSQNKGSKRRQLLATLRALEAASLSQHPPSLCISDSEEEEEERKKKCPKKASFASASAEVGKKGKKKCQKQGPPCSDSEEEVERKKKCHKQALVGSDSAEDEKRKRKCQKHAPINSAQHLDNVDQTGPKAWKGSTTNDPPKQSPGSTSPKPPHTLSRKQWRNRQKNKRRCKNKFQPPQVPDQAPAEAPTEKTEVSPVPRTDSHGARAGALRARMAQRLDGARFRYLNEQLYSGPSSAAQRLFQEDPEAFLLYHRGFQSQVKKWPLQPVDRIARDLRQRPASLVVADFGCGDCRLASSIRNPVHCFDLASLDPRVTVCDMAQVPLEDESVDVAVFCLSLMGTNIRDFLEEANRVLKPGGLLKVAEVSSRFEDVRTFLRAVTKLGFKIVSKDLTNSHFFLFDFQKTGPPLVGPKAQLSGLQLQPCLYKRR

SEQ ID NO: 524 - protein, 98 aa, Homo sapiens
  SIGNAL -17..-1
MPSSFFLLLQFFLRIDGVLIRMNDTRLYHEADKTYMLREYTSRESKISSLMHVPPSLFTEPNEISQYLPIKEAVCEKLIFPERIDPNPADSQKSTQVE

SEQ ID NO: 525 - protein, 83 aa, Homo sapiens [sequence omitted]

SEQ ID NO: 526 - protein, 229 aa, Homo sapiens
  SIGNAL -23..-1
MGDKIWLPFPVLLLAALPPVLLPGAAGFTPSLDSDFTFTLPAGQKECFYQPMPLKASLEIEYQVLDGAGLDIDFHLASPEGKTLVFEQRKSDGVHTVETEVGDYMFCFDNTFSTISEKVIFFELILDNMGEQAQEQEDWKKYITGTDILDMKLEDILESISSIKSRLSKSGHIQILLRAFEARDRNIQESNFDRVNFWSMVNLVVMVVVSAIQVYMLKSLFEDKRKSRT

SEQ ID NO: 527 - protein, 152 aa, Homo sapiens
  SIGNAL -21..-1
MAQLGAVVAVASSFFCASLFSAVHKIEEGHIGVYYRGGALLTSTSGPGFHLMLPFITSYKSVQTTLQTDEVKNVPCGTSGGVMIYFDRIEVVNFLVPNAVHDIVKNYTADYDKALIFNKIHHELNQFCSVHTLQEVYIELFGLENDFSQESS

SEQ ID NO: 528 - protein, 179 aa, Homo sapiens
  SIGNAL -54..-1
MAASEAAVVSSPSLKTDTSPVLETAGTVAAMAATPSARAAAAVVAAAARTGSEARVSKAALATKLLSLSGVFAVHKPKGPTSAELLNRLKEKLLAEAGMPSPEWTKRKKQTLKIGHGGTLDSAARGVLVVGIGSGTKMLTSMLSGSKRYTAIGELGKATDTLDSTGKVTEEKPYGMNLI

SEQ ID NO: 529 - protein, 269 aa, Homo sapiens
  SIGNAL -92..-1
MITHVTLEDALSNVDLLEELPLPDQQPCIEPPPSSIMYQANFDTNFEDRNAFVTGIARYIEQATVHSSMNEMLEEGHEYAVMLYTWRSCSRAIPQVKCNEQPNRVEIYEKTVEVLEPEVTKLMKFMYFQRKAIERFCSEVKRLCHAERRKDFVSEAYLLTLGKFINMFAVLDELKNMKCSVKNDHSAYKRAAQFLRKMADPQSIQESQNLSMFLANHNRITQCLHQQLEVIPGYEELLADIVNICVDYYENKMYLTPSEKHMLLKVKLP

SEQ ID NO: 530 - protein, 135 aa, Homo sapiens
  SIGNAL -22..-1
MQTVYYGSLGLWLALVDGLVRSSPSLDQMFDAEILGFSTPPGRLSMMSFIFNALTCALGLLYFIRRGKQCLDFTVTVHFFHLLGCWFYSSRFPSALTWWLVQAVCIALMAVIGEYLCMRTELKEIPLNSAPKSNV

SEQ ID NO: 531 - protein, 67 aa, Homo sapiens
  SIGNAL -38..-1
MNNVQPKIKHRPFCFSVKGHVKMLRLVFALVTAVCCLADGALIYRKLLFNPNGPYQKKPVHEKKEVL

SEQ ID NO: 532 - protein, 125 aa, Homo sapiens
  SIGNAL -54..-1
MADEELEALRRQRLAELQAKHGDPGDAAQQEAKHREAEMRNSILAQVLDQSARARLSNLALVKPEKTKAVENYLIQMARYGQLSEKVSEQGLIEILKKVSQQTEKTTTVKFNRRKVMDSDEDDDY

SEQ ID NO: 533 - protein, 376 aa, Homo sapiens
  SIGNAL -21..-1
MGHRFLRGLLTLLLPPPPLYTRHRMLGPESVPPPKRSRSKLMAPPRIGTHNGTFHCDEALACALLRLLPEYRDAEIVRTRDPEKLASCDIVVDVGGEYDPRRHRYDHHQRSFTETMSSLSPGRPWQTKLSSAGLIYLHFGHKLLAQLLGTSEEDSMVGTLYDKMYENFVEEVDAVDNGISQWAEGEPRYALTTTLSARVARLNPTWNHPDQDTEAGFKRAMDLVQEEFLQRLDFYQHSWLPARALVEEALAQRFQVDPSGEIVELAKGACPWKEHLYHLESGLSPPVAIFFVIYTDQAGQWRIQCVPKEPHSFQSRLPLPEPWRGLRDEALDQVSGIPGCIFVHASGFIGGHRTREGALSMARATLAQRSYLPQIS

SEQ ID NO: 534 - protein, 211 aa, Homo sapiens
  SIGNAL -30..-1
MGEASPPAPARRHLLVLLLLLSTLVIPSAAAPIHDADAQESSLGLTGLQSLLQGFSRLFLKGNLLRGIDSLFSAPMDFRGLPGNYHKEENQEHQLGNNTLSSHLQIDKVPRMEEKEALVPIQKATDSFHTELHPRVAFWIIKLPRRRSHQDALEGGHWLSEKRHRLQAIRDGLRKGTHKDVLEEGTESSSHSRLSPRKTHLLYILRPSRQL

SEQ ID NO: 535 - protein, 154 aa, Homo sapiens
  SIGNAL -60..-1
MGSKCCKGGPDEDAVERQRRQKLLLAQLHHRKRVKAAGQIQAWWRGVLVRRTLLVAALRAWMIQCWWRTLVQRRIRQRRQALLRVYVIQEQATVKLQSCIRMWQCRQCYRQMCNALCLFQVPESSLAFQTDGFLQVQYAIPSKQPEFHIEILSI

SEQ ID NO: 536 - protein, 123 aa, Homo sapiens [sequence omitted]

SEQ ID NO: 537 - protein, 346 aa, Homo sapiens
  SIGNAL -19..-1
MAMAQKLSHLLPSLRQVIQEPQLSLQPEPVFTVDRAEVPPLFWKPYIYAGYRPLHQTWRFYFRTLFQQHNEAVNVWTHLLAALVLLLRLALFVETVDFWGDPHALPLFIIVLASFTYLSLSALAHLLQAKSEFWHYSFFFLDYVGVAVYQFGSALAHFYYAIEPAWHAQVQAVFLPMAAFLAWLSCIGSCYNKYIQKPGLLGRTCQEVPSVLAYALDISPVVHRIFVSSDPTTDDPALLYHKCQVVFFLLAAAFFSTFMPERWFPGSCHVFGQGHQLFHIFLVLCTLAQLEAVALDYEARRPIYEPLHTHWPHNFSGLFLLTVGSSILTAFLLSQLVQRKLDQKTK

SEQ ID NO: 538 - protein, 210 aa, Homo sapiens
  SIGNAL -20..-1
MDNRFATAFVIACVLSLISTIYMAASIGTDFWYEYRSPVQENSSDLNKSIWDEFISDEADEKTYNDALFRYNGTVGLWRRCITIPKNMHWYSPPERTESFDVVTKCVSFTLTEQFMEKFVDPGNHNSGIDLLRTYLWRCQFLLPFVSLGLMCFGALIGLCACICRSLYPTIATGILHLLAVTKESMLPAGAESKHTATPAHACVQTGKPK

SEQ ID NO: 539 - protein, 184 aa, Homo sapiens
  SIGNAL -20..-1
MDNRFATAFVIACVLSLISTIYMAASIGTDFWYEYRSPVQENSSDLNKSIWDEFISDEADEKTYNDAPFRYNGTVGLWRRCITIPKNMHWYSPPERTESFDVVTKCVSFTLTEQFMEKFVDPGNHNSGIDLLRTYLWRCQFLLPFVSLGLMCFGALIGLCACICRSLYPTIATGILHLLADTML

SEQ ID NO: 540 - protein, 227 aa, Homo sapiens
  SIGNAL -22..-1
MGWTMRLVTAALLLGLMMVVTGDEDENSPCAHEALLDEDTLFCQGLEVFYPELGNIGCKVVPDCNNYRQKITSWMEPIVKFPGAVDGATYILVMVDPDAPSRAEPRQRFWRHWLVTDIKGADLKKGKIQGQELSAYQAPSPPAHSGFHRYQFFVYLQEGKVISLLPKENKTRGSWKMDRFLNRFHLGEPEASTQFMTQNYQDSPTLQAPRERASEPKHKNQAEIAAC

SEQ ID NO: 541 - protein, 74 aa, Homo sapiens
  SIGNAL -41..-1
MIARRNPVPLRFLPDEARSLPPPKLTDPRLLYIGFLGYCSGLIDNLIRRRPIATAGLHRQLLYITAFFLLDIIL

SEQ ID NO: 542 - protein, 73 aa, Homo sapiens
MEKYENLGLVGEGSYGMVMKCRNKDTGRIVAIKKFLESDDDKMVKKIAMREVKLLKQLRHENLVNLLEVCKKK

SEQ ID NO: 543 - protein, 82 aa, Homo sapiens [sequence omitted]

SEQ ID NO: 544 - protein, 119 aa, Homo sapiens
  SIGNAL -56..-1
MAEPSAATQSHSISSSSFGAEPSAPGGGGSPGACPALGTKSCSSSCADSFVSSSSSQPVSLFSTSQEGLSSLCSDEPSSEIMTSSFLSSSEIHNTGLTILHGEKSHVLGSQPILAKKKK

SEQ ID NO: 545 - protein, 54 aa, Homo sapiens
AFVWEPAMVRINALTAASEAACLIVSVDETIKNPRSTVDAPTAAGRGRGRGRPH

SEQ ID NO: 546 - protein, 210 aa, Homo sapiens
  SIGNAL -14..-1
MLTLLGLSFILAGLIVGGACIYKYFMPKSTIYRGEMCFFDSEDPANSLRGGEPNFLPVTEEADIREDDNIAIIDVPVPSFSDSDPAAIIHDFEKGMTAYLDLLLGICYLMPLNTSIVMPPKNLVELFGKLASGRYLPQTYVVREDLVAVEEIRDVSNLGIFIYQLCNNRKSFRLRRRDLLLGFNKRAIDKCWKIRHFPNEFIVETKICQE

SEQ ID NO: 547 - protein, 108 aa, Homo sapiens
MGCVFQSTEDKCIFKIDWTLSPGEHAKDEYVLYYYSNLSVPIGRFQNRVHLMGDILCNDGSLLLQDVQEADQGTYICEIRLKGESQVFKKAVVLHVLPEEPKGTQMLT

SEQ ID NO: 548 - protein, 43 aa, Homo sapiens [sequence omitted]

SEQ ID NO: 549 - protein, 36 aa, Homo sapiens
MSARIPFYKDTSQIRLGSTIIPHFNLITFVKTFFQI

SEQ ID NO: 550 - protein, 307 aa, Homo sapiens
  SIGNAL -13..-1
MLAVSLTVPLLGAMMLLESPIDPQPLSFKEPPLLLGVLHPNTKLRQAERLFENQLVGPESIAHIGDVMFTGTADGRVVKLENGEIETIARFGSGPCKTRDDEPVCGRPLGIRAGPNGTLFVADACKGLFEVNPWKREVKLLLSSETPIEGKNMSFVNDLTVSQDGRKIYFTDSSSKWQRRDYLLLVMEGTDDGRLLEYDTVTREVKVLLDQLRFPNGVQLSPAEDFVLVAETTMARIRRVYVSGLMKGGADLFVENMPGFPDNIRPSSSGGYWVGMSTIRPNPGFSMLDFLSERPWIKRMIFKAKKK

SEQ ID NO: 551 - protein, 106 aa, Homo sapiens
  SIGNAL -32..-1
MFAPAVMRAFRKNKTLGYGVPMLLLIVGGSFGLREFSQIRYDAVKSKMDPELEKKLKENKISLESEYEKIKDSKFDDWKNIRGPRPWEDPDLLQGRNPESLKTKTT

SEQ ID NO: 552 - protein, 42 aa, Homo sapiens
  SIGNAL -19..-1
MDLRQFLMCLSLCTAFALSKPTEKKDRVHHEPQLSDKVHNDI

SEQ ID NO: 553 - protein, 117 aa, Homo sapiens
  SIGNAL -20..-1
MDNRFATAFVIACVLSLISTIYMAASIGTDFWYEYRSPVQENSSDLNKSIWDEFISDEADEKTYNDALFRYNGTVGLWGRCITIPKNMHWYSPPERTGISLILTSVFFTWLIIDKTT

SEQ ID NO: 554 - protein, 178 aa, Homo sapiens
  SIGNAL -37..-1
  misc_feature (-19, -18, -16, -15): unknown
MERQSRVMSEKDEYQFQHXXAXXLLVFNFLLILTILTIWLFKNHRFRFLHETGGAMVYGLIMGLISRYATAPTDIESGTVCDCVKLTFSPPTLLVNVTDQVYEYKYKREISQHNINPHQGNAILEKMTFDPEIFFNVLLPPIIFHAGYSLKKRHFFQNLGSILTYAFLGTAISCIVIG

SEQ ID NO: 555 - protein, 126 aa, Homo sapiens
  SIGNAL -27..-1
MQFVNVGYFLIAAGVVVLALGFLGCYGAKTESMCALVTFFFILLLIFIAEVAAAVVALVYTTMAEHFLTLLVVPAIKKDYGSQEDFTQVWNTTMKGLKCRGFTNYTDFEDSPYFKMHKPVTMKKKK

SEQ ID NO: 556 - protein, 174 aa, Homo sapiens
  SIGNAL -115..-1
MRWSCEHLVMVWINAFVMLTTQLLPSKYCDLLHKSAAHLGKWQKLEHGSYSNAPQHIWSENTIWPQGVLVRHSRCLYRAMGPYNVAVPSDVSHARFYFLFHRPLRLLNLLILIEGGVVFYQLYSLLRSEKWNHTLSMALILFCNYYVLFKLLRDRIVLGRAYSYPLNSYELKAN

SEQ ID NO: 557 - protein, 52 aa, Homo sapiens
  SIGNAL -20..-1
  misc_feature (12): unknown
MPSVNSAGLCVLQLTTAVTSAFLLAKVNPFEXFLSRGFWLCAAHHFIHPCLD

SEQ ID NO: 558 - protein, 193 aa, Homo sapiens
  SIGNAL -23..-1
  misc_feature (-8): unknown
MVVLRAGKKTFLPPLXRAFACRGCQLAPERGAERRDTAPSGVSRFCPPRKSCHDWIGPPDKYSNLRPVHFYIPENESPLEQKLRKLRQETQEWNQQFWANQNLTFSKEKEEFIHSRLKTKGLGLRTESGQKATLNAEEMADFYKEFLSKNFQKHMYYNRDWYKRNFAITFFMGKVALERIWNKLKQKQKKRSN

SEQ ID NO: 559 - protein, 82 aa, Homo sapiens
  SIGNAL -14..-1
  misc_feature (-9, 37, 38, 40): unknown
MAFTLXSLLQAALLCVNAIAVLHEERFLKNIGWGTDQGIGGFGEEPGIKSXXMXLIRSVRTVMRVPLIIVNSIAIVLLLLFG

SEQ ID NO: 560 - protein, 198 aa, Homo sapiens
  SIGNAL -21..-1
  misc_feature (85, 89, 113, 114, 117, 118, 136, 150, 153, 161, 162, 164): unknown
MPVPALCLLWALAMVTRPASAAPMGGPELAQHEELTLLFHGTLQLGQALNGVYRTTEGRLTKARNSLGLYGRTIELLGQEVSRGRDAAQELRASLLETQMEEDILXLQAXATAEVLGEVAQAQKVLRDSVQRLXXQLXXAWLGPAYRKFEVLKAPPXKQNHILWALTGHVXRQXREMVAQQXXLXQIQEKLHTAALPA

SEQ ID NO: 561 - protein, 160 aa, Homo sapiens
  SIGNAL -55..-1
  misc_feature (98): unknown
MDKLKKVLSGQDTEDRSGLSEVVEASSLSWSTRIKGFIACFAIGILCSLLGTVLLWVPRKGLHLFAVFYTFGNIASIGSTIFLMGPVKQLKRMFEPTRLIATIMVLLCFALTLCSAFWWHNKGLALIFCILQSLALTWYSLSFIPFARDAVKXCFAVCLA

SEQ ID NO: 562 - protein, 108 aa, Homo sapiens
  SIGNAL -18..-1
MKALCLLLLPVLGLLVSSKTLCSMEEAINERIQEVAGSLIFRAISSIGRGSESVTSRGDLATCPRGFAVTGCTCGSACGSWDVRAETTCHCQCAGMDWTGARCCRVQP

SEQ ID NO: 563 - protein, 64 aa, Homo sapiens
  SIGNAL -22..-1
  misc_feature (15, 17, 40): unknown
MISRQLRSLSCLCPALFPGTSSFIVALSSPADLYIPXRXRSDELVFESQKGSAMELAVITVXGV

SEQ ID NO: 564 - protein, 27 aa, Homo sapiens
  SIGNAL -15..-1
  misc_feature (-11): unknown
MGFLXLMTLTTHVHSSAKPNEQPWLLN

SEQ ID NO: 565 - protein, 186 aa, Homo sapiens
  SIGNAL -21..-1
  misc_feature (72, 74, 95, 98, 101, 102, 105, 125): unknown
MSPSGRLCLLTIVGLILPTRGQTLKDTTSSSSADSTIMDIQVPTRAPDAVYTELQPTSPTPTWPADETPQPQTQTQQLEGTDGPLVTDPETHXSXKAAHPTDDTTTLSERPSPSTXVHXRPXXPSXHLVFMRMTPSSMMNTPSGNXGCWSQLCCSSQASSSSPVASAGSCPGYAGIIAGESIRNRS

SEQ ID NO: 566 - protein, 179 aa, Homo sapiens
  SIGNAL -26..-1
  misc_feature (36, 63, 103, 128, 131, 139, 152): unknown
METGALRRPQLLPLLLLLCGPSQDQCRPVLQNLLQSPGLTWSLEVPTGREGKEGGDRGPGLXGATPARSPQGKEMGRQRTRKVKGPAWXHTANQELNRMRSLSSGSVPVGHLEGGTVKLQKDTGLHSCXDGMASLEGTPASVLADACPGFHDVXVQXALFGLSGXXLWLKTHFCLSIXL

SEQ ID NO: 567 - protein, 150 aa, Homo sapiens
  SIGNAL -55..-1
MATTVPDGCRNGLKSKYYRLCDKAEAWGIVLETVATAGVVTSVAFMLTLPILVCKVQDSNRRKMLPTQFLFLLGVLGIFGLTFAFIIGLDGSTGPTRFFLFGILFSICFSCLLAHAVSLTKLVRGRKAPFPVGDSGSGRGLQPSPGCYRY

SEQ ID NO: 568 - protein, 236 aa, Homo sapiens
  SIGNAL -31..-1
  misc_feature (28, 30, 40, 67, 86, 117, 120): unknown
MLSKGLKRKREEEEEKEPLAVDSWWLDPGHAAVAQAPPAVASSSLFDLSVLKLHHSLQXSXPDLRHLVLVXNTLRRIQASMAPAAALPPVPTPPAAPXVADNLLASSDAALSASMAXLLEDLSHIEGLSQAPQPLADEGPPGRSIGGXPPXLGALDLLGPATGCLLDNGLEGLFEDIDTSMYDNELWAPASEGLKPGPEDGPGKEEAPELDEAELDYLMDVLVGTQALERPPGPGR

SEQ ID NO: 569 - protein, 149 aa, Homo sapiens
  SIGNAL -100..-1
  misc_feature (30, 33, 34): unknown
METLYRVPFLVLECPNLKLKKPPWLHMPSAMTVYALVVVSYFLITGGIIYDVIVEPPSVGSMTDEHGHQRPVAFLAYRVNGQYIMEGLASSFLFTMGGLGFIILDGSNAPNIPKLNRFLLLFIGFVCVLXSFXXARVFMRMKLPGYLMG

SEQ ID NO: 570 - protein, 69 aa, Homo sapiens
  SIGNAL -49..-1
  misc_feature (-1, 1): unknown
MPFHFPFLGFVCLHLHLTPCLTVPRRPLFLLLHLCPHLPFLLLLSCVGXXPSCLPSSSTCVSLHFFIPD

SEQ ID NO: 571 - protein, 241 aa, Homo sapiens
  SIGNAL -30..-1
  misc_feature (58): unknown
MGTASRSNIARHLQTNLILFCVGAVGACTLSVTQPWYLEVDYTHEAVTIKCTFSATGCPSEQPTCLWFRYGAHQPENLCLDGCKSEAXKFTVREALKENQVSLTVNRVTSNDSAIYICGIAFPSVPEARAKQTGGGTTLVVREIKLLSKELRSFLTALVSLLSVYVTGVCVAFILLSKSKSNPLRNKEIKEDSQKKKSARRIFQEIAQELYHKRHVETNQQSEKDNNTYENRRVLSNYERP

SEQ ID NO: 572 - protein, 47 aa, Homo sapiens
  SIGNAL -30..-1
MNCNVVSERGKWLEVECSLMTCTTLINASAISTNTLTDMGSFDRRES

SEQ ID NO: 573 - protein, 65 aa, Homo sapiens
  SIGNAL -28..-1
  misc_feature (36): unknown
MAFGLQMFIQRKFPYPLQWSLLVAVVAGSVVSYGVTRVESEKCNNLWLFLETGQLPKDRSTDQXS

SEQ ID NO: 574 - protein, 73 aa, Homo sapiens
  SIGNAL -24..-1
  misc_feature (35, 37, 39, 40): unknown
MTCWMLPPISFLSYLPLWLGPIWPCSGSTLGKPDPGVWPSLFRPWDAASPGNYALSRGXNXYXXWGQGTHSSL

SEQ ID NO: 575 - protein, 60 aa, Homo sapiens [sequence omitted]

SEQ ID NO: 576 - protein, 192 aa, Homo sapiens
  SIGNAL -93..-1
  misc_feature (21, 28, 39, 42): unknown
MAELGLNEHHQNEVINYMRFARSKRGLRLKTVDSCFQDLKESRLVEDTFTIDEVSEVLNGLQAVVHSEVESELINTAYTNVLLLRQLFAQAEKWYLKLQTDISELENRELLEQXAEFEKAXITSSNKKPILXVTXPKLAPLNEGGTAKLLNKVICIILRNGKSLILSCHCLGWRNKSGRFVSGPLRIISPLQ

SEQ ID NO: 577 - protein, 149 aa, Homo sapiens
  SIGNAL -72..-1
MNLFIMYMAGNTISIFPTMMVCMMAWRPIQALMAISATFKMLESSSQKFLQGLVYLIGNLMGLALAVYKCQSMGLLPTHASDWLAFIEPPERMESVVEDCFCEHEKAAPGPYVFGSYLHPSLSPVAPQHTLKLITYVKKNQKTLFSMVG

SEQ ID NO: 578 - protein, 73 aa, Homo sapiens
  SIGNAL -20..-1
  misc_feature (51): unknown
MTPLLTLILVVLMGLPLAQALDCHVCAYNGDNCFNPMRCPAMVAYCMTTRTYYTPTRMKVSKSCVPRCFEXCV

SEQ ID NO: 579 - protein, 86 aa, Homo sapiens
  SIGNAL -20..-1
  misc_feature (62): unknown
MNLHFPQWFVHSSALGLVLAPPFSSPGTDPTFPCIYCRLLNMIMTRLAFSFITCLCPNLKEVCLILPEKNCNSRHAGFVGPXKLRQ

SEQ ID NO: 580 - protein, 78 aa, Homo sapiens
  SIGNAL -21..-1
  misc_feature (12): unknown
MCPVFSKQLLACGSLLPGLWQHLTANHWPPFSXFLCTVCSGSSEQISEYTASATPPLCRSLNQEPFVSRAIRPKYSIT

SEQ ID NO: 581 - protein, 65 aa, Homo sapiens
  SIGNAL -28..-1
MGKGHQRPWWKVLPLSCFLVALIIWCYLREESEADQWLRQVWGEVPEPSDRSEEPETPAAYRART

SEQ ID NO: 582 - protein, 211 aa, Homo sapiens
  SIGNAL -27..-1
  misc_feature (10, 87, 93, 96, 106, 109, 111, 118, 122, 159, 171, 176): unknown
MLLLSITTAYTGLELTFFSGVYGTCIGATNKFGAEEXSLIGLSGIFIGIGEILGGSLFGLLSKNNRFGRNPVVLLGILVHFIAFYLIFLNMPGDAPIAPVKGTDSSAYIKSSKXFAILCXFLXGLGNSCFNTXLLXIXGFLYSEXSAPXFAIFNFVQSICAAVAFFYSNYLLLHWQLLVMVIFGFXGTISFFTVEWEXAAFVXRGSDYRSI

SEQ ID NO: 583 - protein, 123 aa, Homo sapiens
  SIGNAL -80..-1
  misc_feature (36): unknown
MSTWYLALNKSYKNKDSVRIYLSLCTVSIKFTYFHDIQTNCLTTWKHSRCRFYWAFGGSILQHSVDPLVLFLSLALLVTPTSTPSAKIQSLQIDLPGGWRLATDRIFTLSPVPMDXPLILHQL

SEQ ID NO: 584 - protein, 86 aa, Homo sapiens
  SIGNAL -26..-1
  misc_feature (28, 35, 43, 45, 58, 60): unknown
MEKSWMLWNFVERWLIALASWSWALCRISLLPLIVTFHLYGGIILLLLIFISIXGILYKFXDVLLYFPXQXSSSRLYDSHAHWXSX

SEQ ID NO: 585 - protein, 162 aa, Homo sapiens
  SIGNAL -31..-1
  misc_feature (-22, 119, 120, 125): unknown
MAAAWPSGPXAPEAVTARLVGVLWFVSVTTGPWGAVATSAGGEESLKCEDLKVGQYICKDPKINDATQEPVNCTNYTAHVSCFPAPNITCKDSSGNETHFTGNEVGFFKPISCRNVNGYSYNEQSHVSFSWMVGSRSILPWIPCFGFVKXXHCRVXWNWEPN

SEQ ID NO: 586 - protein, 98 aa, Homo sapiens
  SIGNAL -37..-1
  misc_feature (26, 28, 50): unknown
MASLLCCGPKLAACGIVLSAWGVIMLIMLGIFFNVHSAVLIEDVPFTEKDFENGPQNIYNLYXQXSYNCFIAAGLYLLLGGFSFCQXRLNKRKEYMVR

SEQ ID NO: 587 - protein, 70 aa, Homo sapiens
  SIGNAL -15..-1
  misc_feature (9, 10, 12, 16): unknown
MRFLPCCLLWSVFNPESLNCHYFXXEXCIFXSLQYYEISLQEKLLGFLWLCFLSYFFRAVYFLIDFSSFT

SEQ ID NO: 588 - protein, 60 aa, Homo sapiens [sequence omitted]

SEQ ID NO: 589 - protein, 39 aa, Homo sapiens
  SIGNAL -22..-1
  misc_feature (8, 9): unknown
MPEAVEQSAHLFVTWSSQRALSHPAPFLTXXKNPFLWKL

SEQ ID NO: 590 - protein, 51 aa, Homo sapiens
  SIGNAL -23..-1
  misc_feature (13, 24): unknown
MAFQSLLEMKFFLCAAFPLGAGVKMFHYLGPGKPLXQASPSPHPHRXRIWP

SEQ ID NO: 591 - protein, 95 aa, Homo sapiens
  SIGNAL -48..-1
  misc_feature (12, 13, 33, 34): unknown
MASSHWNETTTSVYQYLGFQVQKIYPFHDNWNTACFVILLLFIFTVVSLVVLAFLYEVLXXCCCVKNKTVKDLKSEPNPLXXMMDNIRKRETEVV

SEQ ID NO: 592 - protein, 60 aa, Homo sapiens [sequence omitted]

SEQ ID NO: 593 - protein, 170 aa, Homo sapiens
  SIGNAL -79..-1
  misc_feature (7, 8, 17, 49, 52, 54, 68, 77): unknown
MEDPNPEENMKQQDSPKERSPQSPGGNICHLGAPKCTRCLITFADSKFQERHMKREHPADFVAQKLQGVLFICFTCARSFPSSKAXXTHQRSHGPXAKPTLPVATTTAQPTFPCPDCGKTFGQAVSLXRHXQXHEVRAPPGTFACTXCGQDFAQEXGLHQHYIRHARGGL

SEQ ID NO: 594 - protein, 190 aa, Homo sapiens
  SIGNAL -82..-1
  misc_feature (26, 54, 84): unknown
MYVWPCAVVLAQYLWFHRRSLPGKAILEIGAGVSLPGILAAKCGAEVILSDSSELPHCLEVCRQSCQMNNLPHLQVVGLTWGHISWDLLALPPQDIILASDVFFEPEXFEDILATIYFLMHKNPKVQLWSTYQVRXADWSLEALLYKWDMKCVHIPLESFDADKEXIAESTLPGRHTVEMLVISFAKDSL

SEQ ID NO: 595 - protein, 114 aa, Homo sapiens
  SIGNAL -60..-1
MMAAVPPGLEPWNRVRIPKAGNRSAVTVQNPGAALDLCIAAVIKECHLVILSLKSQTLDAETDVLCAVLYSNHNRMGRHKPHLALKQVEQCLKRLKNMNLEGSIQDLFELFSSK

SEQ ID NO: 596 - protein, 161 aa, Homo sapiens
  SIGNAL -108..-1
  misc_feature (-99): unknown
MTSGQARASXQSPQALEDSGPVNISVSITLTLDPLKPFGGYSRNVTHLYSTILGHQIGLSGREAHEEINITFTLPTAWSSDDCALHGHCEQVVFTACMTLTASPGVFPSLYSHRTVFLTRTATPRSGTRSSQLPEMPTQNTPKITILSGVIRGPLEKSIML

SEQ ID NO: 597 - protein, 67 aa, Homo sapiens
  SIGNAL -21..-1
MLGGDHRALLLKIWLLQRPESQEGLLPGRLVVMERRVKNDLMSFLSTVLLSFHSSNARVSHCEPLRM

SEQ ID NO: 598 - protein, 332 aa, Homo sapiens
  SIGNAL -32..-1
  misc_feature (-30, 108, 134, 139, 140, 154, 206, 217): unknown
MIXLRDTAASLRLERDTRQLPLLTSALHGLQQQHPAFSGVARLAKRWVRAQLLGEGFADESLDLVAAALFLHPEPFTPPSSPQVGFLRFLFLVSTFDWKNNPLFVNLNNELTVEEQVEIRSGFLAARAQLPVMVIVTPQXRKNSVWTQDGPSAQILQQLVVLAAEXLPMLXXQLMDPRGPGDIRTXFRPPLDIYDVLIRLSPRHIPRHRQAVDSPAASFCRGLLSQPGPSSLMPVLGXDPPQLYLTQLXEAFGDLALFFYDQHGGEVIGVLWKPTSFQPQPFKASSTKGRMVMSRGGELVMVPNVEAILEDFAVLGEGLVQTVEARSERWTV

SEQ ID NO: 599 - protein, 65 aa, Homo sapiens
  SIGNAL -19..-1
MGGIWNALSMSSFSFHSSSCSALSAKSLLSRHHILQQFLVRKSVPLENASLPFPHLGSSLFKIVG

SEQ ID NO: 600 - protein, 57 aa, Homo sapiens
  SIGNAL -30..-1
  misc_feature (23): unknown
MPTGKQLADIGYKTFSTSMMLLTVYGGYLCSVRVYHYFQWRRAQRQAAEEQKXSGIM

SEQ ID NO: 601 - protein, 85 aa, Homo sapiens
  SIGNAL -17..-1
  misc_feature (24): unknown
MKKVLLLITAILAVAVGFPVSQDQEREKRSISDSDELASGXFVFPYPYPFRPLPPIPFPRFPWFRRNFPIPIPESAPTTPLPSEK

SEQ ID NO: 602 - protein, 85 aa, Homo sapiens
  SIGNAL -17..-1
  misc_feature (7): unknown
MKKVLLLITAILAVAVGFPVSQDXEREKRSISDSDELASGFFVFPYPYPFRPLPPIPFPRFPWFRRNFPIPIPESAPTTPLPSEK

SEQ ID NO: 603 - protein, 69 aa, Homo sapiens
  SIGNAL -29..-1
  misc_feature (24, 26, 34, 37): unknown
MTCRGSCSYATRRSPSELSLLPSSLWVLATSSPTITIALAMAAGNLCPLPSSXRXKRRWCQAXQQXALL

SEQ ID NO: 604 - protein, 122 aa, Homo sapiens
  SIGNAL -56..-1
  misc_feature (-13, 4): unknown
MVPWPRGKVKTAPIPISRFPFLPTHDPPTPAHWSPASHQQFKHXSPLLTLALLGQCSLFXNLRKKLAGQKAKKLPSFSSLPLTLWPLTPQFAELTTVAQKKLRWSGTLGWGPVPSWVQFFLG

SEQ ID NO: 605 - protein, 41 aa, Homo sapiens
  SIGNAL -30..-1
MACETHGVLVPAHLSGLITCLLAFWVPASCIQRCSGSPLPL

SEQ ID NO: 606 - protein, 50 aa, Homo sapiens
  SIGNAL -36..-1
MAPHTASFGVCPLLSVTRVVATEHWLFLASLSGIKTYQSYISVFCKVTLI

SEQ ID NO: 607 - protein, 136 aa, Homo sapiens
  SIGNAL -18..-1
  misc_feature (-2, 73, 102, 107, 110): unknown
MDSLRKMLISVAMLGAXAGVGYALLVIVTPGERRKQEMLKEMPLQDPRSREEAARTQQLLLATLQEAATTQENVAWRKNWMVGGEGGATGXHRETGLASVGAGPWLGRRNPRQLSPSWAXRKIRXENXMPGLSGVL

SEQ ID NO: 608 - protein, 194 aa, Homo sapiens
  SIGNAL -65..-1
  misc_feature (20, 83, 95, 121): unknown
MQDAPLSCLSPTKWSSVSSADSTEKSASAAGTRNLPFQFCLRQALRMKAAGILTLIGCLVTGVESKIYTRCKLAKIFSRAGLDNXRGFSLGNWICMAYYESGYNTTAQTVLDDGSIDYGIFQINSFAWCRRGKLKENNHCHVACSALXTDDLTDAIICAXKIVKETQGMNYWQGWKKHCEGRDLSXWKKGCEVS

SEQ ID NO: 609 - protein, 141 aa, Homo sapiens
  SIGNAL -69..-1
  misc_feature (27, 29, 38, 42, 43, 50, 55, 60): unknown
MTSQPVPNETIIVLPSNVINFSQAEKPEPTNQGQDSLKKHLHAEIKVIGTIQILCGMMVLSLGIILASASFSPNFTQVTSTLLNSAYPFIGPFFVXKXSEEGRMGQXGEEXXNSLNFPXASLLXLICQXQGFNGESCSPVG

SEQ ID NO: 610 - protein, 248 aa, Homo sapiens
  SIGNAL -69..-1
  misc_feature (-25, 65, 79, 83, 90, 91, 94, 106, 112, 130, 131, 155): unknown
MTSQPVPNETIIVLPSNVINFSQAEKPEPTNQGQDSLKKHLHAEXKVIGTIQILCGMMVLSLGIILASASFSPNFTQVTSTLLNSAYPFIGPFFFIISGSLSIATKKRLTNLLVHTTLVGSILSALSALVGFIXLSVKQATLNPASLXCELXKNNIPTXXYVXYFYHDSLYTTDXYTAKAXLAGTLSLMLICTLLEFCXXVLTAVLRWKQAYSDFPGSVLFLPXSYIGNSGMSSKMTHDCGYEELLTS

SEQ ID NO: 611 - protein, 49 aa, Homo sapiens
  SIGNAL -36..-1
  misc_feature (-24, 11): unknown
MQVPHLRVWTQVXDTFIGYRNLGFTSMCILFHCLLSFQVFKKKRKLXLF

SEQ ID NO: 612 - protein, 86 aa, Homo sapiens [sequence omitted]

SEQ ID NO: 613 - protein, 144 aa, Homo sapiens
  SIGNAL -58..-1
MTRLCLPRPEAREDPIPVPPRGLGAGEGSGSPVRPPVSTWGPSWAQLLDSVLWLGALGLTIQAVFSTTGPALLLLLVSFLTFDLLHRPAVTLCHSANFSPGARVRGPVKVLDSRRLYSCKWVQSQDNLASRKHCCCCSWGWARS

SEQ ID NO: 614 - protein, 121 aa, Homo sapiens
  SIGNAL -16..-1
  misc_feature (56, 59, 63, 70, 73, 78, 79, 104, 105): unknown
MERLVLTLCTLPLAVASAGCATTPARNLSCYQCFKVSSWTECPPTWCSPLDQVCISNEVVVSFSESPPGRGXVPXAGEXPVPPPLXDLXMTPRXXRAWGPVGPKVPPAVSPALGSGEHPXX

SEQ ID NO: 615 - protein, 162 aa, Homo sapiens
  SIGNAL -16..-1
  misc_feature (69, 106, 117, 134, 141): unknown
MERLVLTLCTLPLAVASAGCATTPARNLSCYQCFKVSSWTECPPTWCSPLDQVCISNEVVVSFKWSVRVLLSKRCAPRCPNDNMXFEWSPAPMVQGVITRRCCSWALCNRALTPQEGRWALXGGLLLQDPSRGXKTWVRPQLGLPLCLPXSNPLCPXETQEG

SEQ ID NO: 616 - protein, 110 aa, Homo sapiens
  SIGNAL -20..-1
  misc_feature (-19, -3): unknown
MXLMVLVFTIGLTLLLGXQAMPANRLSCYRKILKDHNCHNLPEGVADLTQIDVNVQDHFWDGKGCEMICYCNFKRIALLPKRRFLWTKDLFRDSLQQSMRIFMYSGEHHS

SEQ ID NO: 617 - protein, 71 aa, Homo sapiens
  SIGNAL -15..-1
  misc_feature (43): unknown
MKLLTHNLLSSHVRGVGSRGFPLRLQATEVRICPVEFNPNFVARMIPKVEWSAFLEAXDNLRLIQVPRRAG

SEQ ID NO: 618 - protein, 99 aa, Homo sapiens
  SIGNAL -24..-1
  misc_feature (66): unknown
MKSAKLGFLLRFFIFCSLNTLLLGGVNKIAEKICGDLKDPCKLDMNFGSCYEVHFRYFYNRTSKRCETFVFSSCNGNLNNFKLKIEREVXCVAKYKPPR

SEQ ID NO: 619 - protein, 169 aa, Homo sapiens
  SIGNAL -25..-1
  misc_feature (115): unknown
MRKPAAGFLPSLLKVLLLPLAPAAAQDSTQASTPGSPLSPTEYQRFFALLTPTWKAETTCRLRATHGCRNPTLVQLDQYENHGLVPDGAVCSNLPYASWFESFCQFTHYRCSNHVYYAKRVLCSQPVSILSPNTLKEIEXSAEVSPTTDDLPHLTPLHSDRTPDLPALA

SEQ ID NO: 620 - protein, 167 aa, Homo sapiens
  SIGNAL -76..-1
  misc_feature (35, 58, 61, 64): unknown
MGDYLLRGYRMLGETCADCGTILLQDKQRKIYCVACQELDSDVDKDNPALNAQAALSQAREHQLASASELPLGSRPAPQPPVPRPEHCEGAAAGLKAAQGPPAPAVPPNTXVMACTQTALLQKLTWASAELGSXTSXGKXASSCVALSAHVRRPCAACSSYSTKRSP

SEQ ID NO: 621 - protein, 70 aa, Homo sapiens
  SIGNAL -15..-1
  misc_feature (28, 38, 39, 46, 47, 48, 49, 50): unknown
MILCFLLPHHRLQEARQIQVLKMLPREKLRRREERKQINGKKXRTKYETPRKXXGKKGGNXXXXXLSKRD

SEQ ID NO: 622 - protein, 381 aa, Homo sapiens
  SIGNAL -33..-1
  misc_feature (-13, 72, 98, 117, 126, 183, 300): unknown
MSWTVPVVRASQRVSSVGANXLCLGMALCPRQATRIPLNGTWLFTPVSKMATVKSELIERFTSEKPVHHSKVSIIGTGSVGMACAISILLKGLSDELALVDLDEXKLKGETMDLQHGSPFTKMPNIVCSKXYFVTANSNLVIITAGARQXKGETRLNLXQRNVAIFKLMISSIVQYSPHCKLIIVSNPVDILTYVAWKLSAFPKNRIIGSGCNLIXARFRFLIGQKLGIHSESCHGWILGEHGDSSVPVWSGVNIAGVPLKDLNSDIGTDKDPEQWKNVHKEVTATAYEIIKMKGYTSWAIGLSVADLTESILKNLRRIHPVSTITKGLYGIXEEVFLSIPCILGENGITNLIKIKLTPEEEAHLKKSAKTLWEIQNKLKL

SEQ ID NO: 623 - protein, 39 aa, Homo sapiens
  SIGNAL -14..-1
MYYMVCLFFRLIFSEHLPIIGTVTSHKTGTLTVYPTSAG

SEQ ID NO: 624 - protein, 50 aa, Homo sapiens
  SIGNAL -37..-1
MVLTTLPLPSANSPVNMPTTGPNSLSYASSALSPCLTAPKSPRLAMMPDN

SEQ ID NO: 625 - protein, 51 aa, Homo sapiens
  SIGNAL -26..-1
  misc_feature (11, 13, 17): unknown
MTPWCLACLGRRPLASLQWSLTLAWCGSGSHWTERPXQXSPWXSLSATTRG

SEQ ID NO: 626 - protein, 242 aa, Homo sapiens
  SIGNAL -30..-1
  misc_feature (100, 103, 122, 165, 182, 184, 185, 200, 207): unknown
MGEASPPAPARRHLLVLLLLLSTLVIPSAAAPIHDADAQESSLGLTGLQSLLQGFSRLFLKGNLLRGIDSLFSAPMDFRGLPGNYHKEENQEHQLGNNTLSSHLQIDKMTDNKTGEVLISENVVASIQPXEGXFEGDLKVPRMEEKEALVPXQKATDSFHTELHPRVAFWIIKLPRRRSHQDALEGGHWLXEKRHRLQAIRDGLRKGTHKDXLXXGTESSSHSRLSPRKXHLLYILXPSRQL

SEQ ID NO: 627 - protein, 154 aa, Homo sapiens
  SIGNAL -60..-1
MGSKCCKGGPDEDAVERQRRQKLLLAQLHHRKRVKAAGQIQAWWRGVLVRRTLLVAALRAWMIQCWWRTLVQRRIRQRRQALLGVYVIQEQAAVKLQSCIRMWQCRQCYRQMCNALCLFQVPKSSLAFQTDGFLQVQYAIPSKQPEFHIEILSI

SEQ ID NO: 628 - protein, 89 aa, Homo sapiens
  SIGNAL -61..-1
  misc_feature (13, 28): unknown
MNAAINTGPAPAVTKTETEVQNPDVLWDLDIPEARSHADQDSNPKAEALLPCNLHCSWLHSSPRPDPHSHFPSXRRCPLPHPCATYPPX

SEQ ID NO: 629 - protein, 73 aa, Homo sapiens
  SIGNAL -26..-1
MRMSLAQRVLLTWLFTLLFLIMLVLKLDEKAPWNWFLIFIPVWIFDTILLVLLIVKMAGRCKSGFDLDMDHTI

SEQ ID NO: 630 - protein, 54 aa, Homo sapiens
  SIGNAL -34..-1
MIPLISHLAEAAPPTSWSLISSVLNVGHLLFSSACSVSLEALSTRNIKAIILMK

SEQ ID NO: 631 - protein, 121 aa, Homo sapiens
  SIGNAL -38..-1
  misc_feature (49, 62, 74, 78): unknown
MESPQLHCILNSNSVACSFAVGAGFLAFLSCLAFLVLDTQETRIAGTRFKTAFQLLDFILAVLWAVVWFMGFCFLANQWQHSPPKEXLLGSSSAQAAIGXHLLLHPCLDIPXLPGXPGPPK

SEQ ID NO: 632 - protein, 166 aa, Homo sapiens
  SIGNAL -37..-1
  misc_feature (49, 80, 116, 120): unknown
MSTVGLFHFPTPLTRICPAPWGLRLWEKLTLLSPGIAVTPVQMAGKKDYPALLSLDENELEEQFVKGHGPGGQATNKTSNCVVLKXIPSGIVVKCHQTRSVDQNRKLARKILQEKVXVFYNGENSPVHKEKREAAKKKQERKKRAKETLEKKXLLKXLWESSKKVH

SEQ ID NO: 633 - protein, 180 aa, Homo sapiens
  SIGNAL -26..-1
  misc_feature (89, 107, 111, 117, 121): unknown
MGIQTSPVLLASLGVGLVTLLGLAVGSYLVRRSRRPQVTLLDPNEKYLLRLLDKTTVSHNTKRFRFALPTAHHTLGLPVGKHIYLSTRIDGSLVIRPYTPVTSDEDQGYVDLVXKVYLKGVHPKFPEGGKMSXYLDXLKVGDXVEFXGPSGLLTYTGKGHFNIQPNKNLHQNPEWRRNWE

SEQ ID NO: 634 - protein, 91 aa, Homo sapiens [sequence omitted]

SEQ ID NO: 635 - protein, 257 aa, Homo sapiens
  SIGNAL -23..-1
  misc_feature (-8, 100, 101, 143, 153, 156, 182, 184, 189, 192, 199, 202, 203, 214, 229,230, 233, 234): unknown
MRRISLTSSPVRLLLXLLLLLIALEIMVGGHSLCFNFTIKSLSRPGQPWCEAHVFLNKNLFLQYNSDNNMVKPLGLLGKKVYATSTWGELTQTLGEVGRDLRMLLCDIKPQIKTSDPSTLQVXXFCQREAERCTGASWQFATNGEKSLLFDAMNMTWTVINHEASXIKETWKKDRXLEXYFRKLSKGDCDHWLREFLGHWEAMPXPXVSPXNASXIHWSSSXLPXXWIILGAFILLXLMGIVLICVWWQNGXXSTXX

SEQ ID NO: 636 - protein, 193 aa, Homo sapiens
  SIGNAL -60..-1
  misc_feature (11, 51, 53, 69, 75, 83, 85): unknown
MCPSLEEAPSVKGTLPCSGQQQPFPFGASNIPLLLGRSRKVARGAPVLWPFLTWINPALSICDPLGSCGWXCHTAQVPAPLQLPTACPPLPHGTRAVGPTPGLLPEAAAPXTXGALSSRSRHWSCSIVXCLHLHXLLSVETRXFXKHLLVLLVAVAHSVLEPPALVPNVQCEMCTHSGPRDLEAAVVSPAPWE

SEQ ID NO: 637 - protein, 107 aa, Homo sapiens
  SIGNAL -28..-1
  misc_feature (40): unknown
MVLTLGESWPVLVGRRFLSLSAADGSDGSHDSWDVERVAEWPWLSGTIRAVSHTDVTKKDLKVCVEFXGESWRKRRWIEVYSLLRKAFLVKHNLVLAERKSPEISWG

SEQ ID NO: 638 - protein, 121 aa, Homo sapiens
  SIGNAL -13..-1
  misc_feature (63, 69): unknown
MLVLRSALTRALASRTLAPQMCSSFATGPRQYDGIFYEFRSYYLKPSKMNEFLENFEKNAQLRTAHSELVGYWSVXFGGRMXTVFHIWKYDNFAHRTEFQKALAKDKEWQEQFLIPNLALN

SEQ ID NO: 639 - protein, 44 aa, Homo sapiens
  SIGNAL -17..-1
MKVGVLWLISFFTFTDGHGGFLGVSWCYVSYLFSTNSPLSFRRI

SEQ ID NO: 640 - protein, 109 aa, Homo sapiens
  SIGNAL -13..-1
  misc_feature (18, 79, 90, 93): unknown
MCLLTALVTQVISLRKNAERTCLCKRRWPWXPSPRIYCSSTPCDSKFPTVYSSAPFHAPLPVQNSLWGHPLHGCSWQCHHPQGQNLQPASLXTHLSKPKRHFXKKXCQA

SEQ ID NO: 641 - protein, 143 aa, Homo sapiens
  SIGNAL -41..-1
MATATEQWVLVEMVQALYEAPAYHLILEGILILWIIRLLFSKTYKLQERSDLTVKEKEELIEEWQPEPLVPPVPKDHPALNYNIVSGPPSHKTVVNGKECINFASFNFLGLLDNPRVKAAALASLKKYGVGTCGPCGFYGTFE

SEQ ID NO: 642 - protein, 232 aa, Homo sapiens
  SIGNAL -30..-1
  misc_feature (2, 3, 58, 61): unknown
MAATSGTDEPVSGELVSVAHALSLPAESYGNXXDIEMAWAMRAMQHAEVYYKLISSVDPQFLKLTKVDDQIYSEFRKNFETLRIDVLXPEXLKSESAKEPPGYNSLPLKLLGTGKAITKLFISVFRTKKERKESTMEEKKELTVEKKRTPRMEERKELIVEKKKRKESTEKTKLTKEEKKGKKLTKKSTKVVKKLCKVYREQHSRSYDSIETTSTTVLLAQTPLVKCKFLYN

SEQ ID NO: 643 - protein, 61 aa, Homo sapiens
  SIGNAL -21..-1
MTFRHQDNSLMFFSMMATCTSNVGFTHTTMNCSLTSPVDFKDLLRVLLIKFGYDRKSTIKS

SEQ ID NO: 644 - protein, 34 aa, Homo sapiens
  SIGNAL -19..-1
  misc_feature (11): unknown
MFLKSGAGLSSCLLPLCWLERKDHGRRPSXHPGR

SEQ ID NO: 645 - protein, 215 aa, Homo sapiens
  SIGNAL -54..-1
  misc_feature (-52, -45, -42, -39, 27, 97, 104, 124, 127): unknown
MNXYASPFNXQLXYLXLSRFECVHRDGRVITLSYQEQELQDFLLSQMSQHQVHAVQQLAKVMGWQVLSFSNHVGLGPIESXGNASAITVAPQVVTMLFQFVMDLKVAARLWFSFLVTNVKTFQKVMFYKITNGVIFVGHSKKFSGIKWKVXILFIKWXCLCLHLALVYYDFFQMFPKXVSXNFDLKCLQINYKHKEEITSKRVLFLKIIIRKCFI

SEQ ID NO: 646 - protein, 27 aa, Homo sapiens [sequence omitted]

SEQ ID NO: 647 - protein, 85 aa, Homo sapiens
  SIGNAL -24..-1
  misc_feature (56): unknown
MCSHASMSFHTLFHLLFLPHYIETFKPQSKHCFFWIAAFLTSLLTPQSLQGFHSSLCALRSQHFPSTCNCFCYLTIIALXYWDNL

SEQ ID NO: 648 - protein, 51 aa, Homo sapiens; identical to SEQ ID NO: 509
  SIGNAL -16..-1

SEQ ID NO: 649 - protein, 67 aa, Homo sapiens
  SIGNAL -43..-1
  misc_feature (15): unknown
MTPQYLPHGGKYQVLGDYSLAVVFPLHFSDLISVLYLIPKTLTTNTAVKHSIQKNCMXLVLGKLLSQ

SEQ ID NO: 650 - protein, 63 aa, Homo sapiens
  SIGNAL -15..-1
MGILSTVTALTFARALDGCRNGIAHPASEKHRLEKCRELESSHSAPGSTQHRRKTTRRNYSSA

SEQ ID NO: 651 - protein, 179 aa, Homo sapiens
  SIGNAL -58..-1
  misc_feature (54, 55, 56, 74, 76, 89, 103): unknown
MSTGQLYRMEDIGRFHSQQPGSLTPSSPTVGEIIYNNTRNTLGWIGGILMGSFQGTIAGQGTGATSISELCKGQELEPSGAGLTVAPPQAVSLQGIYTLPWLLQLFHSTALXXXQQPNGSLSLNISSSHAPXPXTCTLEPGVDPTRXVCINPHPPPPILKXPLSPYPKPQLGTHAGQVN

SEQ ID NO: 652 - protein, 238 aa, Homo sapiens
  SIGNAL -71..-1
  misc_feature (-70, -69): unknown
MXXFTDPSSVNEKKRREREERQNIVLWRQPLITLQYFSLEILVILKEWTSKLWHRQSIVVSFLLLLAGLIATYYVEGVHQQYVQRIEKQFLLYAYWIGLGILSSVGLGTGLHTFLLYLGPHIASVTLAAYECNSVNFPEPPYPDQIICPDEEGTEGTISLWSIISKVRIEACMWGIGTAIGELPPYFMARAARLSGAEPDDEEYQEFEEMLEHAESAQVRTVGIENRTLYFFLKRLLR

SEQ ID NO: 653 - protein, 178 aa, Homo sapiens
  SIGNAL -37..-1
  misc_feature (24, 30, 42, 77, 82, 95): unknown
MERQSRVMSEKDEYQFQHQGAVELLVFNFLLILTILTIWLFKNHRFRFLHETGGAMVYGLXMGLILXYATAPTDIESGXVYDCVKLTFSPSTLLVNITDQVYEYKYKREISQHXINPHXGNAILEKMTFDPXIFFNVLLPPIIFHAGYSLKKRHFFQNLGSILTYAFLGTAISCIVIG

SEQ ID NO: 654 - protein, 96 aa, Homo sapiens
  SIGNAL -21..-1
  misc_feature (46, 64): unknown
MSMQFLFKMVALCCCLWKISGCEEVPLTYNLLKCLLDKAHCVLLTPCGYIFSLISPEILKLTLITLXILLILKNLHLLWLTVSSXCVHRSSARKEK

SEQ ID NO: 655 - protein, 41 aa, Homo sapiens
  SIGNAL -24..-1
MHTFANDRGLYRILLLHFYCLLRSSEYILGYKVLGVFFPIL

SEQ ID NO: 656 - protein, 113 aa, Homo sapiens
  SIGNAL -27..-1
  misc_feature (-25, -2, 4, 83): unknown
MRXKWKMGGMKYIFSLLFFLLLEGGXTEQVXHSETYCMFQDKKYRVGERWHPYLEPYGLVYCVNCICSENGNVLCSRVRCPNVHCLSPVHIPHLCCPRCPEDSLPPVNNXVTS

SEQ ID NO: 657 - protein, 250 aa, Homo sapiens
  SIGNAL -18..-1
  misc_feature (52, 89, 90, 97, 99): unknown
MRILQLILLALATGLVGGETRIIKGFECKPHSQPWQAALFEKTRLLCGATLIAPRWLLTAAHCLKPRYIXHLGQHNLQKEEGCEQTRTATESFPHPGFNNSLPNKDXXNDIMLVXMXSPVSITWAVRPLTLSSRCVTAGTSCLISGWGSTSSPQLRLPHTLRCANITIIEHQKCENAYPGNITDTMVCASVQEGGKDSCQGDSGGPLVCNQSLQGIISWGQDPCAITRKPGVYTKVCKYVDWIQETMKNN

SEQ ID NO: 658 - protein, 151 aa, Homo sapiens
  SIGNAL -21..-1
MAASTSMVPVAVTAAVAPVLSINSDFSDLREIKKQLLLIAGLTRERGLLHSSKWSAELAFSLPALPLAELQPPPPITEEDAQDMDAYTLAKAYFDVKEYDRAAHFLHGCNARKAYFLYMYSRYLVRAILKCHSAFSETSIFRTNGKVKSFK

SEQ ID NO: 659 - protein, 239 aa, Homo sapiens
  SIGNAL -25..-1
  misc_feature (20, 98, 99, 100, 101, 103, 150, 151, 152, 173): unknown
MPRKRKCDLRAVRVGLLLGGGGVYGSRFRFTFPGCRALSPWRVRXQRRRCEMSTMFADTLLIVFISVCTALLAEGITWVLVYRTDKYKRLKAEVEKQSKKLEKKKETITESAGRQQKKKIERXXXXLXNNNRDLSMVRMKSMFAIGFCFTALMGMFNSIFDGRVVAKLPFTPLSXXXGLSHRNLLGDDTTDCSFIFLXILCTMSIRQNIQKILGLAPSRAATKQAGGFLGPPPPSGKFS

SEQ ID NO: 660 - protein, 208 aa, Homo sapiens
  SIGNAL -92..-1
  misc_feature (-79, -78, -77, 22, 36, 46, 51, 57, 70, 73, 74, 111): unknown
MREPQKRTATIAKXXAXEGLRDPYGRLCGSEHPRRPPERPEEDPSTPEEASTTPEEASSTAQAQKPSVPRSNFQGTKKSLLMSILALIFIMGNSAKEALVWKVLGKLGMQPGRXHSIFGDPKKIVTEXFVRRGYLIYXPVPRXSPVEYXFFWGPRAHVESSXLKXXHFVARVRNRCSKDWPCNYDWDSDDDAEVEAILNSGAXGYSAP

SEQ ID NO: 661 - protein, 86 aa, Homo sapiens
  SIGNAL -39..-1
  misc_feature (-32, -31): unknown
MNVGTAHXXVNPNTRVMNSRGIWLSYVLAIGLLHIVLLSIPFVSVPVVWTLTNLIHNMGMYIFLHTVKGTPFETPDQGKARLLTHW

SEQ ID NO: 662 - protein, 40 aa, Homo sapiens; identical to SEQ ID NO: 520
  SIGNAL -27..-1

SEQ ID NO: 663 - protein, 65 aa, Homo sapiens
  SIGNAL -16..-1
  misc_feature (41, 44): unknown
MLGFFLFLSFVLMYDGLRLFGILSTCRVHHTMNQFLIDISSFTSRVKKKIFLFYAFXGCXFQSAT

SEQ ID NO: 664 - protein, 130 aa, Homo sapiens
  SIGNAL -55..-1
  misc_feature (-48, -47, -46, -39, -23, -22, 23, 41, 42): unknown
MAMWNRPXXXLPQQPLXAEPTAEGEPHLPTGRXXTEANRFAYAALCGISLSQLFPEPEHSSFCTEFMAGLVXWLELSEAVLPTMTAFASGLGGEGXXCVCSNFTEGPHLEGRPDGDHSGPSELLTQGWAL

SEQ ID NO: 665 - protein, 209 aa, Homo sapiens
  SIGNAL -84..-1
  misc_feature (48, 50, 74, 76): unknown
MVNFPQKIAGELYGPLMLVFTLVAILLHGMKTSDTIIREGTLMGTAIGTCFGYWLGVSSFIYFLAYLCNAQITMLQMLALLGYGLFGHCIVLFITYNIHLRALFYLFWLLVGGLSTLRMVAVLVSRTVGPTXRXLLCGTLAALHMLFLLYLHFAYHKXVXGILDTLEGPNIPPIQRVPRDIPAMLPAARLPTTVLNATAKAVAVTLQSH

SEQ ID NO: 666 - protein, 36 aa, Homo sapiens
  SIGNAL -17..-1
MGWQRWWCFHLQAEASAHPPQGLQAQFSCCPWVGIC

SEQ ID NO: 667 - protein, 44 aa, Homo sapiens [sequence omitted]

SEQ ID NO: 668 - protein, 163 aa, Homo sapiens
  SIGNAL -52..-1
  misc_feature (36, 47, 54, 65, 70, 103, 107, 108): unknown
MEHYRKAGSVELPAPSPMPQLPPDTLEMRVRDGSKIRNLLGLALGRLEGGSARHVVFSGSGRAAGKAVSCAEIVKRRVPGLHQLTKLXFLQTEDSWVPXSPDTGLXPLTVRRHVPAXWVLLXRDPLDPNECGYQPPGAPPGLGSMPSSSCGPRSXKRAXXTRS

SEQ ID NO: 669 - protein, 64 aa, Homo sapiens
  SIGNAL -47..-1
  misc_feature (11, 15): unknown
MHGFEIISLKEESPLGKVSQGPLFNVTSGSSSPVTWLGLLSFQNLHCFPDLPTEMPLXAKGXNT

SEQ ID NO: 670 - protein, 218 aa, Homo sapiens
  SIGNAL -50..-1
  misc_feature (44, 47, 58, 91, 99, 100, 107, 113, 116, 132, 134, 135, 140, 159): unknown
MHHGLTPLLLGVHEQKQQVVKFLIKKKANLNALDRYGRTALILAVCCGSASIVSLLLEQNIDVSSQDLSGQTAKKYAVSSRHNVICQLLSDYKXKQXLKVSSENSNPXQDLKLTSEEESQRLKGSENSQPEEMSQEPEINXGGDRKVEXXMKKHGSXHMGFPXNLXNGATADNGDDGLIPPXKXXTPESXQFPDTENEQYHRDFSGHPXFPTTLPIKQ

SEQ ID NO: 671 - protein, 216 aa, Homo sapiens
  SIGNAL -15..-1
  misc_feature (72, 74, 77, 82, 92, 105, 115, 124): unknown
MVCVLVLAAAAGAVAVFLILRIWVVLRSMDVTPRESLSILVVAGSGGHTTEILRLLGSLSNAYSPRHYVIADTDEMSANKINSFELXRXDRXPSNMXTKYYIHRIPXSREVQQSWPSTVXTTLHSMWLSXPLIHRVKPXLVLCNGPGTCVPICVSALLLGILGIKKVIIVYVESICRVKTLSMSGKILFHLSNYFIVQWPALKEKYPKSVYLGRIV

SEQ ID NO: 672 - protein, 134 aa, Homo sapiens
  SIGNAL -19..-1
  misc_feature (24, 55): unknown
MPLGARILFHGVFYAGGFAIVYYLIQKFHSRTLYYKLAVEQLQXHPEAQEALGPPLNIHYLKLIDRENFVDIVXAKLKIPVSGSKSEGLLYVHSSRGGPFQRWHLDEVFLELKDGQQIPVFKLSGENGDEVKKE

SEQ ID NO: 673 - protein, 85 aa, Homo sapiens
  SIGNAL -16..-1
  misc_feature (-8, 53, 57): unknown
MAVTALAAXTWLGVWGVRTMQARGFGSDQSENVDRGAGSIREAGGAFGKREQAEEERYFRAQSTEQLAXLKKXHEEEIVHHREGD

SEQ ID NO: 674 - protein, 292 aa, Homo sapiens
  SIGNAL -29..-1
  misc_feature (62, 82, 85, 95, 112, 186, 212, 244): unknown
MHGLLHYLFHTRNHTFIVLHLVLQGMVYTEYTWEVFGYCQELELSLHYLLLPYLLLGVNLFFFTLTCGTNPGIITKANELLFLHVYEFDEXMFPKNVRCSTCDLRKPARSXHCXVCNWCVHRFXHHCVWVNNCIGAWNIRXFLIYVLTLTASAATVAIVSTTFLVHLVVMSDLYQETYIDDLGHLHVMDTVFLIQYLFLTFPRIVFMLGFVVVLXFLLGGYLLFVLYLAATNQTTNEWYRXDWAWCQRCPLVAWPPSAEPQVHRNIHSHGLRXNLQEIFLPAFPCHERKKQE

SEQ ID NO: 675 - protein, 122 aa, Homo sapiens
  SIGNAL -56..-1
  misc_feature (5, 10, 19, 33): unknown
MTGFLLPPASRGTRRSCSRSRKRQTRRRRNPSSFVASCPTLLPFACVPGASPTTLAFPPVXLTGPXTDGIPFALXSAAGPFCASFPSGXLSPPGPLPGVRGLPLPSVFYSCGAHPKVLKVAL

SEQ ID NO: 676 - protein, 59 aa, Homo sapiens
  SIGNAL -28..-1
  misc_feature (-26, -19, -2): unknown
MLXLSRATKXGRARWLMPVIPALQEAXAGGSRGQEFETSLANMETEAGELLKPRRRRLQ

SEQ ID NO: 677 - protein, 99 aa, Homo sapiens
  SIGNAL -13..-1
  misc_feature (77): unknown
MHLLSNWANPASSRRPSMAASGTSWISSTLAHSLSLRDVSERLCSCWRTISMGPCARGSPMNSSGVHRKSSRLFYIRTPMRRSSCHLECXVIFLLGRQL

SEQ ID NO: 678 - protein, 99 aa, Homo sapiens
  SIGNAL -13..-1
  misc_feature (75): unknown
MHLLSNWANPASSRRPSMAASGTSWISSTLAHSLSLRDVSERLCSCWRTISMGPCARGSPMNSSGVHRKSSRLFYIRTPMRRSSCHLXCQVIFLLGRQL

SEQ ID NO: 679 - protein, 108 aa, Homo sapiens
  SIGNAL -25..-1
MSLTSSSSVRVEWIAAVTIAAGTAAIGYLAYKRFYVKDHRNKAMINLHIQKDNPKIVHAFDMEDLGDKAVYCRCWRSKKFPFCDGAHTKHNEETGDNVGPLIIKKKET

SEQ ID NO: 680 - protein, 183 aa, Homo sapiens
  SIGNAL -15..-1
  misc_feature (101, 110, 114, 136): unknown
MEAMWLLCVALAVLAWGFLWVWDSSERMKSREQGRRLGAESRTLLVIAHPDDEAMFFAPTVLGLARLRHWVYLLCFSAGNYYNQGETRKKELLQSCDVLGIPLSSVMIIDNRDFPXDPGMQWDTXHVAXVLLQHIEVNGINLVVTFDAGGXSGHSNHIALYAAVRKLEGQICKPCGTGQDFKE

SEQ ID NO: 681 - protein, 98 aa, Homo sapiens
  SIGNAL -15..-1
  misc_feature (20, 75, 82): unknown
MEAMWLLCVALAVLAWGFLWVWDSSERMKSREQGXRLGAESRTLLVIAHPDDEAMFFAPTVLGLARLRHWVYLLCFSAVFRRELSEYTEXLTSEPLXA

SEQ ID NO: 682 - protein, 183 aa, Homo sapiens
  SIGNAL -57..-1
  misc_feature (23, 30, 41, 62, 63, 73, 86, 95, 102): unknown
MDVTGDEEEEIKQEINMLKKYSHHRNIATYYGAFIKKNPPGMDDQLWLVMEFCGAGSVTDLIKNTKGNTLKEEWIAYICXEILRGLXHLHQHKVIHRXIKGQNVLLTENAEVKLVDFGXXAQLDRTVGRXNTFIGTPYWMAPXVIACDENPXATYDFKXDLWSLGITAIEMAEGLPLSVTCTP

SEQ ID NO: 683 - protein, 140 aa, Homo sapiens
  SIGNAL -14..-1
  misc_feature (83): unknown
MFLTALLWRGRIPGRQWIGKHRRPRFVSLRAKQNMIRRLEIEAENHYWLSMPYMTREQERGHAALRRREAFEAIKAAATSKFPPHRFIADQLDHLNXHQEMVLILSRHPWILWITELTIFTWSGLKNCSLCENELWTSLY

SEQ ID NO: 684 - protein, 59 aa, Homo sapiens
  SIGNAL -14..-1
  misc_feature (6, 14): unknown
MAALVTVLFTGVRRLHCSAXLGRAASGXYSRNWLPTPPATGPLPSSQTGHMRMAALLPQ

SEQ ID NO: 685 - protein, 101 aa, Homo sapiens
  SIGNAL -36..-1
  misc_feature (41, 42, 60, 64): unknown
MGPYNVAVPSDVSHARFYFLFHRPLRLLNLLILIEGSVVFYQLYSLLRSEKWNHTLSMALILFCNYYVLFKLLRDRXXLGRAYSYPLNSYELKANXAASXQ

SEQ ID NO: 686 - protein, 341 aa, Homo sapiens
  SIGNAL -55..-1
MRKVVLITGASSGIGLALCKRLLAEDDELHLCLACRNMSKAEAVCAALLASHPTAEVTIVQVDVSNLQSFFRASKELKQRFQRLDCIYLNAGIMPNPQLNIKALFFGLFSRKVIHMFSTAEGLLTQGDKITADGLQEVFETNVFGHFILIRELEPLLCHSDNPSQLIWTSSRSARKSNFSLEDFQHSKGKEPYSSSKYATDLLSVALNRNFNQQGLYSNVACPGTALTNLTYGILPPFIWTLLMPAILLLRFFANAFTLTPYNGTEALVWLFHQKPESLNPLIKYLSATTGFGRNYIMTQKMDLDEDTAEKFYQKLLELEKHIRVTIQKTDNQARLSGSCL

SEQ ID NO: 687 - protein, 108 aa, Homo sapiens
  SIGNAL -42..-1
  misc_feature (9, 32, 37, 50, 51, 55): unknown
MHILQLLTTVDDGIQAIVHCPDTGKDIWNLLFDLVCHEFCQSDDPAIILQXQKTVLASVFSVLSAIYASQTEQXYLKIXKGDGGSGSKGRPXXQTEXFLCISKPSSFL

SEQ ID NO: 688 - protein, 80 aa, Homo sapiens
  SIGNAL -26..-1
MEEISSPLVEFVKVLCTNQVLITARAVPTKKASVRCVEKRFWIPKTTSKHLSRCIDGISGFLNDFTFCLEFSRHRCQLTE

SEQ ID NO: 689 - protein, 158 aa, Homo sapiens
  SIGNAL -44..-1
MAGFLDNFRWPECECIDWSERRNAVASVVAGILFFTGWWIMIDAAVVYPKPEQLNHAFHTCGVFSTLAFFMINAVSNAQVRGDSYESGCLGRTGARVWLFIGFMLMFGSLIASMWILFGAYVTQNTDVYPGLAVFFQNALIFFSTLIYKFGRTEELWT

SEQ ID NO: 690 - protein, 130 aa, Homo sapiens
  SIGNAL -28..-1
MNWELLLWLLVLCALLLLLVQLLRFLRADGDLTLLWAEWQGRRPEWELTDMVVWVTGASSGIGEELAYQLSKLGVSLVLSARRVHELERVKRRCLENGNLKEKDILVLPLDLTDTGSHESGYQSCSPGIW

SEQ ID NO: 691 - protein, 199 aa, Homo sapiens
  SIGNAL -62..-1
  misc_feature (-46, 125): unknown
MSQRSLCMDTSLDVYRXLIELNYLGTVSLTKCVLPHMIERKQGKIVTVNSILGIISVPLSIGYCASKHALRGFFNGLRTELATYPGIIVSNICPGPVQSNIVENSLAGEVTKTIGNNGNQSHKMTTSRCVRLMLISMANDLKEVWISEQPFLLVTYLWQYMPTWAWWITNKMGKKRIENFKSGVDAXSSYFKIFKTKHD

SEQ ID NO: 692 - protein, 180 aa, Homo sapiens
  SIGNAL -25..-1
  misc_feature (4, 78, 112): unknown
MNTVLSRANSLFAFSLSVMAALTFGCFIXTAFKDRSVPVRLHVSRIMLKNVEDFTGPRERSDLGFITFDITADLENIFDWNVKQLFLYLSAEYSTKNNALNQXVLWDKIVLRGDNPKLLLKDMKTKYFFFDDGNGLXGNRNVTLTLSWNVVPNAGILPLVTGSGHVSVPFPDTYEITKSY

SEQ ID NO: 693 - protein, 307 aa, Homo sapiens
  SIGNAL -13..-1
MLAVSLTVPLLGAMMLLESPIDPQPLSFKEPPLLLGVLHPNTKLRQAERLFENQLVGPESIAHIGDVMFTGTADGRVVKLENGEIETIARFGSGPCKTRGDEPVCGRPLGIRAGPNGTLFVADAYKGLFEVNPWKREVKLLLSSETPIEGKNMSFVNDLTVTQDGRKIYFTDSSSKWQRRDYLLLVMEGTDDGRLLEYDTVTREVKVLLDQLRFPNGVQLSPAEDFVLVAETTMARIRRVYVSGLMKGGADLFVENMPGFPDNIRPSSSGGYWVGMSTIRPNPGFSMLDFLSERPWIKRMIFKVKKK

SEQ ID NO: 694 - protein, 59 aa, Homo sapiens
MMYVSIEMSGPTISHLFDYVVCYIYGLKSFSLKQLKKKSWSKYLFESCCYRSLYVCVFI

SEQ ID NO: 695 - protein, 97 aa, Homo sapiens
  SIGNAL -28..-1
MSPAFRAMDVEPRAKGVLLEPFVHQVGGHSCVLRFNETTLCKPLVPREHQFYETLPAEMRKFSPQYKGQSQRPLVSWPSLPHFFPWSFPLWPQGSVA

SEQ ID NO: 696 - protein, 52 aa, Homo sapiens
  SIGNAL -32..-1
MLGTTGLGTQGPSQQALGFFSFMLLGMGGCLPGFLLQPPNRSPTLPASTFAH

SEQ ID NO: 697 - protein, 124 aa, Homo sapiens
  SIGNAL -97..-1
MADDLKRFLYKKLPSVEGLHAIVVSDRDGVPVVKVANDNAPEHALRPGFLSTFALATDQGSKLGLSKNKSIICYYNTYQVVQFNRLPLVVSFIASSSANTGLIVSLEKELAPLFEELRQVVEVS

SEQ ID NO: 698 - protein, 230 aa, Homo sapiens
  SIGNAL -24..-1
MASLGLQLVGYILGLLGLLGTLVAMLLPSWKTSSYVGASIVTAVGFSKGLWMECATHSTGITQCDIYSTLLGLPADIQAAQAMMVTSSAISSLACIISVVGMRCTVFCQESRAKDRVAVAGGVFFILGGLLGFIPVAWNLHGILRDFYSPLVPDSMKFEIGEALYLGIISSLFSLIAGIILCFSCSSQRNRSNYYDAYQAQPLATRSSPRPGQPPKVKSEFNSYSLTGYV

SEQ ID NO: 699 - protein, 72 aa, Homo sapiens
  SIGNAL -32..-1
MFALAVMRAFRKNKTLGYGVPMLLLIAGGSFGLREFSQIRYDAVKSKMDPELEKKPKENKISLESEYEGSIC

SEQ ID NO: 700 - protein, 88 aa, Homo sapiens
  SIGNAL -33..-1
MSQTAWLSLLSSSPFGPFSALTFLFLHLPPSTSLFINLARGQIKGPLGLILLLSFCGGYTKCDFALSYLEIPNRIEFSIMDPKRKTKC

SEQ ID NO: 701 - protein, 106 aa, Homo sapiens
  SIGNAL -32..-1
MFAPAVTRAFRKNKTLGYGVPMLLLIVGGSFGLREFSQIRYDAVKSKMDPELEKKLKENKISLESEYEKIKDSKFDDWKNIRGPRPWEDPDLLQGRNPESLKTKTT

SEQ ID NO: 702 - protein, 267 aa, Homo sapiens
  SIGNAL -21..-1
MWWFQQGLSFLPSALVIWTSAAFIFSYITAVTLHHIDPALPYISDTGTVAPEKCLFGAMLNIAAVLCIATIYVRYKQVHALSPEENVIIKLNKAGLVLGILSCLGLSIVANFQKTTLFAAHVSGAVLTFGMGSLYMFVQTILSYQMQPKIHGKQVFWIRLLLVIWCGVSALSMLTCSSVLHSGNFGTDLEQKLHWNPEDKGYALHMITTAAEWSMSFSFFGFFLTYIRDFQKISLRVEANLHGLTLYDTAPCPINNERTRLLSRDIR

SEQ ID NO: 703 - protein, 108 aa, Homo sapiens; identical to SEQ ID NO: 547

SEQ ID NO: 704 - protein, 69 aa, Homo sapiens
  SIGNAL -46..-1
MSVFWGFVGFLVPWFIPKGPNRGVIITMLVTCSVCCYLFWLIAILAQLNPLFGPQLKNETIWYLKYHWP

SEQ ID NO: 705 - protein, 251 aa, Homo sapiens [sequence omitted]

SEQ ID NO: 706 - protein, 99 aa, Homo sapiens; identical to SEQ ID NO: 411
  SIGNAL -48..-1

SEQ ID NO: 707 - protein, 81 aa, Homo sapiens
  SIGNAL -31..-1
MSNTHTVLVSLPHPHPALTCCHLGLPHPVRAPRPLPRVEPWDPRWQDSELRYPQAMNSFLNERSSPCRTLRQEASADRCDL

SEQ ID NO: 708 - protein, 150 aa, Homo sapiens
MKVHMHTKFCLICLLTFIFHHCNHCHEEHDHGPEALHRQHRGMTELEPSKFSKQAAENEKKYYIEKLFERYGENGRLSFFGLEKLLTNLGLGERKVVEINHEDLGHDHVSHLGILAVQEGKHFHSHNHQHSHNHLNSENQTVTSVSTKKK

SEQ ID NO: 709 - protein, 273 aa, Homo sapiens
  SIGNAL -45..-1
MNWSIFEGLLSGVNKYSTAFGRIWLSLVFIFRVLVYLVTAERVWSDDHKDFDCNTRQPGCSNVCFDEFFPVSHVRLWALQLILVTCPSLLVVMHVAYREVQEKRHREAHGENSGRLYLNPGKKRGGLWWTYVCSLVFKASVDIAFLYVFHSFYPKYILPPVVKCHADPCPNIVDCFISKPSEKNIFTLFMVATAAICILLNLVELIYLVSKRCHECLAARKAQAMCTGHHPHDTTSSCKQDDLLSGDLIFLGSDSHPPLLPDRPRDHVKKTIL

SEQ ID NO: 710 - protein, 413 aa, Homo sapiens
  SIGNAL -37..-1
MASKILLNVQEEVTCPICLELLTEPLSLDCGHSLCRACITVSNKEAVTSMGGKSSCPVCGISYSFEHLQANQHLANIVERLKEVKLSPDNGKKRDLCDHHGEKLLLFCKEDRKVICWLCERSQEHRGHHTVLTEEVFKECQEKLQAVLKRLKKEEEEAEKLEADIREEKTSWKYQVQTERQRIQTEFDQLRSILNNEEQRELQRLEEEEKKTLDKFAEAEDELVQQKQLVRELISDVECRSQWSTMELLQDMSGIMKWSEIWRLKKPKMVSKKLKTVFHAPDLSRMLQMFRELTAVRCYWVDVTLNSVNLNLNLVLSEDQRQVISVPIWPFQCYNYGVLGSQYFSSGKHYWEVDVSKKTAWILGVYCRTYSRHMKYVVRRCANRQNLYTKYRPLFGYWVIGLQNKCKYGAKKK

SEQ ID NO: 711 - protein, 393 aa, Homo sapiens
  SIGNAL -19..-1
MRTLFNLLWLALACSPVHTTLSKSDAKKAASKTLLEKSQFSDKPVQDRGLVVTDLKAESVVLEHRSYCSAKARDRHFAGDVLGYVTPWNSHGYDVTKVFGSKFTQISPVWLQLKRRGREMFEVTGLHDVDQGWMRAVRKHAKGLHIVPRLLFEDWTYDDFRNVLDSEDEIEELSKTVVQVAKNQHFDGFVVEVWNQLLSQKRVGLIHMLTHLAEALHQARLLALLVIPPAITPGTDQLGMFTHKEFEQLAPVLDGFSLMTYDYSTAHQPGPNAPLSWVRACVQVLDPKSKWRSKILLGLNFYGMDYATSKDAREPVVGARYIQTLKDHRPRMVWDSQASEHFFEYKKSRSGRHVVFYPTLKSLQVRLELARELGVGVSIWELGQGLDYFYDLL

SEQ ID NO: 712 - protein, 381 aa, Homo sapiens
  SIGNAL -13..-1
MLLSIGMLMLSATQVYTVLTVQLFAFLNPLPVEADILAYNFENASQTFDDLPARFGYRLPAEGLKGFLINSKPENACEPIVPPPVKDNSSGTFIVLIRRLDCNFDIKVLNAQRAGYKAAIVHNVDSDDLISMGSNDIEVLKKIDIPSVFIGESSASSLKDEFTYEKGGHLILVPEFSLPLEYYLIPFLIIVGICLILIVIFMITKFVQDRHRARRNRLRKDQLKKLPVHKFKKGDEYDVCAICLDEYEDGDKLRILPCSHAYHCKCVDPWLTKTKKTCPVCRQKVVPSQGDSDSDTDSSQEENEVTEHTPLLRPLASVSAQSFGALSESRSHQNMTESSDYEEDDNEDTDSSDAENEINEHDVVVQLQPNGERDYNIANTV

SEQ ID NO: 713 - protein, 291 aa, Homo sapiens
  SIGNAL -42..-1
MDSRVSSPEKQDKENFVGVNNKRLGVCGWILFSLSFLLVIITFPISIWMCLKIIREYERAVVFRLGRIQADKAKGPGLILVLPCIDVFVKVDLRTVTCNIPPQEILTRDSVTTQVDGVVYYRIYSAVSAVANVNDVHQATFLLAQTTLRNVLGTQTLSQILAGREEIAHSIQTLLDDATELWGIRVARVEIKDVRIPVQLQRSMAAEAEATREARAKVLAAEGEMSASKSLKSASMVLAESPIALQLRYLQTLSTVATEKNSTIVFPLPMNILEGIGGVSYDNHKKLPNKA

SEQ ID NO: 714 - protein, 92 aa, Homo sapiens
MPPRNLLELLINIKAGTYLPQSYLIHEHMVITDRIENIDHLGFFIYRLCHDKETYKLQRRETIKGIQKREASNCFAIRHFENKFAVETLICS

SEQ ID NO: 715 - protein, 127 aa, Homo sapiens
  SIGNAL -63..-1
MSAAGARGLRATYHRLPDKVELMLPEKLRPLYNHPAGPRTVFFWAPIMKWGLVCAGLADMARPAEKLSTAQSAVLMATGFIWSRYSLVIIPKNWSLFAVNFFVGAAGASQLFRIWRYNQELKAKAHK

SEQ ID NO: 716 - protein, 84 aa, Homo sapiens
  SIGNAL -20..-1
MKGWGWLALLLGALLGTAWARRSQDLHCGACRALVDELEWEIAQVDPKKTIQMGSFRINPDGSQSVVEVTVTVPPNKVAHSGFG

SEQ ID NO: 717 - protein, 182 aa, Homo sapiens
  SIGNAL -20..-1
MKGWGWLALLLGALLGTAWARRSQDLHCGACRALVDELEWEIAQVDPKKTIQMGSFRINPDGSQSVVEVPYARSEAHLTELLEEICDRMKEYGEQIDPSTHRKNYVRVVGRNGESSELDLQGIRIDSDISGTLKFACGSIVEEYEDELIEFFSREADNVKDKLCSKRTDLCDHALHISHDEL

SEQ ID NO: 718 - protein, 71 aa, Homo sapiens
  SIGNAL -25..-1
MPAGVPMSTYLKMFAASLLAMCAGAEVVHRYYRPDLTIPEIPPKRGELKTELLGLKERKHKPQVSQQEELK

SEQ ID NO: 719 - protein, 73 aa, Homo sapiens
MRIRMTDGRTLVGCFLCTDRDCNVILGSAQEFLKPSDSFSAGEPRVLGLAMVPGHHIVSIEVQRESLTGPPYL

SEQ ID NO: 720 - protein, 169 aa, Homo sapiens
  SIGNAL -150..-1
  UNSURE -67: Xaa = any one of the twenty amino acids
MAETKDTAQMLVTFKDVAVTFTREEWRQLDLAQRTLYREGIGFPKPELVHLLEHGQELWIVKRGLSHATCAEFHSCCPGWSAVXRHLSSLQLLPPEFKGFSCLSLPSSWDYRRPPPCPAGFFVFLVETGLHHVGQAGLELLTSCSPPASASQSAAITGVSHRARQRKTA

SEQ ID NO: 721 - protein, 76 aa, Homo sapiens [sequence omitted]

SEQ ID NO: 722 - protein, 95 aa, Homo sapiens
  SIGNAL -54..-1
MAETKDAAQMLVTFKDVAVTFTREEWRQLDLAQRTLYREVMLETCGLLVSLVESIWLHITENQIKLASPGRKFTNSPDEKPEVWLAPGLFGAAAQ

SEQ ID NO: 723 - protein, 92 aa, Homo sapiens
  SIGNAL -22..-1
MELISPTVIIILGCLALFLLLQRKNLRRPPCIKGWIPWIGVGFEFGKAPLEFIEKARIKYGPIFTVFAMGNRMTFVTEEEGINVFLKSKKKK

SEQ ID NO: 724 - protein, 89 aa, Homo sapiens
  SIGNAL -16..-1
MIISLFIYIFLTCSNTSPSYQGTQLGLGLPSAQWWPLTGRRMQCCRLFCFLLQNCLFPFPLHLIQHDPCELVLTISWDWAEAGASLYSP

SEQ ID NO: 725 - protein, 109 aa, Homo sapiens
MKVDKDRQMVVLEEEFRNISPEELKMELPERQPRFVVYSYKYVRDDGRVSYPLCFIFSSPVGCKPEQQMMYAGSKNRLVQTAELTKVFEIRTTDDLTEAWLQEKLSFFR

SEQ ID NO: 726 - protein, 114 aa, Homo sapiens
  SIGNAL -103..-1
MVIRVYIASSSGSTAIKKKQQDVLGFLEANKIGFEEKDIAANEENRKWMRENVPENSRPATGNPLPPQIFNESQYRGDYDAFFEARENNAVYAFLGLTAPSGSKEAEVQAKQQA

SEQ ID NO: 727 - protein, 124 aa, Homo sapiens
  SIGNAL -97..-1
MADDLKRFLYKKLPSVEGLHAIVVSDRDGVPVIKVANDNAPEHALRPGFLSTFALATDQGSKLGLSKNKSIICYYNTYQVVQFNRLPLVVSFIASSSANTGLIVSLEKELAPLFEELRQVVEVS

SEQ ID NO: 728 - protein, 93 aa, Homo sapiens
  SIGNAL -22..-1
MKPVLPLQFLVVFCLALQLVPGSPKQRVLKYILEPPPCISAPENCTHLCTMQEDCEKGFQCCSSFCGIVCSSETFQKRNRIKHKGSEVIMPAN

SEQ ID NO: 729 - protein, 207 aa, Homo sapiens [sequence omitted]

SEQ ID NO: 730 - protein, 59 aa, Homo sapiens [sequence omitted]

SEQ ID NO: 731 - protein, 56 aa, Homo sapiens [sequence omitted]

SEQ ID NO: 732 - protein, 162 aa, Homo sapiens
  SIGNAL -94..-1
MLQTSNYSLVLSLQFLLLSYDLFVNSFSELLQKTPVIQLVLFIIQDIAVLFNIIIIFLMFFNTFVFQAGLVNLLFHKFKGTIILTAVYFALSISLHVWVMNLRWKNSNSFIWTDGLQMLFVFQRLAAVLYCYFYKRTAVRLGDPHFYQDSLWLRKEFMQVRR

SEQ ID NO: 733 - protein, 154 aa, Homo sapiens
  SIGNAL -68..-1
MASASARGNQDKDAHFPPPSKQSLLFCPKSKLHIHRAEISKIMRECQEESFWKRALPFSLVSMLVTQGLVYQGYLAANSRFGSLPKVALAGLLGFGLGKVSYIGVCQSKFHFFEDQLRGAGFGPQHNRHCLLTCEECKIKHGLSEKGDSQPSAS

SEQ ID NO: 734 - protein, 99 aa, Homo sapiens
MKVEEEHTNAIGTLHGGLTATLVDNISTMALLCTERGAPGVSVDMNITYMSPAKLGEDIVITAHVLKQGKTLAFTSVGLTNKATGKLIAQGRHTKHLGN

SEQ ID NO: 735 - protein, 43 aa, Homo sapiens
  SIGNAL -24..-1
MQCFSFIKTMMILFNLLIFLCGFTNYTDFEDSPYFKMHKPVTM

SEQ ID NO: 736 - protein, 69 aa, Homo sapiens
  SIGNAL -21..-1
MWWFQQGLSFLPSALVIWTSAAFIFSYITAVTLHHIDPALPYISDTGTVAPEKCLFGAMLNIAAVLCQK

SEQ ID NO: 737 - protein, 78 aa, Homo sapiens [sequence omitted]

SEQ ID NO: 738 - protein, 80 aa, Homo sapiens [sequence omitted]

SEQ ID NO: 739 - protein, 241 aa, Homo sapiens [sequence omitted]

SEQ ID NO: 740 - protein, 142 aa, Homo sapiens
MSDSLVVCEVDPELTEKLRKFRFRKETDNAAIIMKVDKDRQMVVLEEEFRNISPEELKMELPERQPRFVVYSYKYVRDDGRVSYPLCFIFSSPVGCKPEQQMMYAGSKNRLVQTAELTKVFEIRTTDDLTEAWLQEKLSFFR

SEQ ID NO: 741 - protein, 178 aa, Homo sapiens
  SIGNAL -22..-1
MHRPEAMLLLLTLALLGGPTWAGKMYGPGGGKYFSTTEDYDHEITGLRVSVGLLLVKSVQVKLGDSWDVKLGALGGNTQEVTLQPGEYITKVFVAFQTFLRGMVMYTSKDRYFYFGKLDGQISSAYPSQEGQVLVGIYGQYQLLGIKSIGFEWNYPLEEPTTEPPVNLTYSANSPVGR

SEQ ID NO: 742 - protein, 90 aa, Homo sapiens
  SIGNAL -19..-1
MKFLAVLVLLGVSIFLVSAQNPTTAAPADTYPATGPADDEAPDAETTAAATTATTAAPTTATTAASTTARKDIPVLPKWVGDLPNGRVCP

SEQ ID NO: 743 - protein, 125 aa, Homo sapiens
  SIGNAL -15..-1
MKLLTHNLLSSHVRGVGSRGFPLRLQATEVRICPVEFNPNFVARMIPKVEWSAFLEAADNLRLIQVPKGPVEGYEENEEFLRTMHHLLLEVEVIEGTLQCPESGRMFPISRGIPNMLLSEEETES

SEQ ID NO: 744 - protein, 136 aa, Homo sapiens
  SIGNAL -34..-1
MLFSLRELVQWLGFATFEIFVHLLALLVFSVLLALRVDGLVPGLSWWNVFVPFFAADGLSTYFTTIVSVRLFQDGEKRLAVLRLFWVLTVLSLKFVFEMLLCQKLAEQTRELWFGLITSPLFILLQLLMIRACRVN

SEQ ID NO: 745 - protein, 238 aa, Homo sapiens
  SIGNAL -53..-1
MADPDPRYPRSSIEDDFNYGSSVASATVHIRMAFLRKVYSILSLQVLLTTVTSTVFLYFESVRTFVHESPALILLFALGSLGLIFALILNRHKYPLNLYLLFGFTLLEALTVAVVVTFYDVYIILQAFILTTTVFFGLTVYTLQSKKDFSKFGAGLFALLWILCLSGFLKFFLYSEIMELVLAAAGALLFCGFIIYDTHSLMHKLSPEEYVLAAISLYLDIINLFLHLLRFLEAVNKK

SEQ ID NO: 746 - protein, 106 aa, Homo sapiens
  SIGNAL -71..-1
MSTNNMSDPRRPNKVLRYKPPPSECNPALDDPTPDYMNLLGMIFSMCGLMLKLKWCAWVAVYCSFISFANSRSSEDTKQMMSSFMLSISAVVMSYLQNPQPMTPPW

SEQ ID NO: 747 - protein, 123 aa, Homo sapiens
  SIGNAL -84..-1
MSGGPEARPPMLVEGGGPESLQKAPCTRGPPSHPVPPALAFTVGNGSGPGVRCPRNMAEGHPGPERRQSQQGLFRAAWLPGSRPSPLFCVCSVTSPGWDVPQVHRVEVGHGRRQETHPVRRRA

SEQ ID NO: 748 - protein, 75 aa, Homo sapiens
  SIGNAL -49..-1
MPRGRRLGMVFAPPRPGQRQAGAPWVPERRKRRPDGDTFLLSFLSTTWLKTWRSQQYKESKSRSCAREQMNSSSC

SEQ ID NO: 749 - protein, 80 aa, Homo sapiens
  SIGNAL -40..-1
MDGIPMSMKNEMPISQLLMIIAPSLGFVLFALFVAFLLRGKLMETYCSQKHTRLDYIGDSKNVLNDVQHGREDEDGLFTL

SEQ ID NO: 750 - protein, 327 aa, Homo sapiens
  SIGNAL -49..-1
MFPSRRKAAQLPWEDGRSGLLSGGLPRKCSVFHLFVACLSLGFFSLLWLQLSCSGDVARAVRGQGQETSGPPRACPPEPPPEHWEEDASWGPHRLAVLVPFRERFEELLVFVPHMRRFLSRKKIRHHIYVLNQVDHFRFNRAALINVGFLESSNSTDYIAMHDVDLLPLNEELDYGFPEAGPFHVASPELHPLYHYKTYVGGILLLSKQHYRLCNGMSNRFWGWGREDDEFYRRIKGAGLQLFRPSGITTGYKTFRHLHDPAWRKRDQKRIAAQKQEQFKVDREGGLNTVKYHVASRTALSVGGAPCTVLNIMLDCDKTATPWCTFS

SEQ ID NO: 751 - protein, 235 aa, Homo sapiens
  SIGNAL -20..-1
MRPLAGGLLKVVFVVFASLCAWYSGYLLAELIPDAPLSSAAYSIRSIGERPVLKAPVPKRQKCDHWTPCPSDTYAYRLLSGGGRSKYAKICFEDNLLMGEQLGNVARGINIAIVNYVTGNVTATRCFDMYEGDNSGPMTKFIQSAAPKSLLFMVTYDDGSTRLNNDAKNAIEALGSKEIRNMKFRSSWVFIAAKGLELPSEIQREKINHSDAKNNRYSGWPAEIQIEGCIPKERS

SEQ ID NO: 752 - protein, 52 aa, Homo sapiens
  SIGNAL -31..-1
MRVYKRTQLRQETGPKSYVLFSASSFPSISGNIRSRNYFQKQNNHWFQTSDY

SEQ ID NO: 753 - protein, 229 aa, Homo sapiens
  SIGNAL -47..-1
MQDEDGYITLNIKTRKPALVSVGPASSFWWRVMALILLILCVGMVVGLVALGIWSVMQRNYLQDENENRTGTLQQLAKRFCQYVVKQSELKGTFKGHKCSPCDTNWRYYGDSCYGFFRHNLTWEESKQYCTDMNATLLKIDNRNIVEYIKARTHLIRWVGLSRQKSNEVWKWEDGSVISENMFEFLEDGKGNMNCAYFHNGKMHPTFCENKHYLMCERKAGMTKVDQLP

SEQ ID NO: 754 - protein, 92 aa, Homo sapiens
  SIGNAL -24..-1
MTKLAQWLWGLAILGSTWVALTTGALGLELPLSCQEVLWPLPAYLLVSAGCYALGTVGYRVATFHDCEDAARELQSQIQEARADLARRGLRF

SEQ ID NO: 755 - protein, 425 aa, Homo sapiens
  SIGNAL -23..-1
MASSSPDSPCSCDCFVSVPPASAIPAVIFAKNSDRPRDEVQEVVFVPAGTHTPGSRLQCTYIEVEQVSKTHAVILSRPSWLWGAEMGANEHGVCIGNEAVWTKEPVGEGEALLGMDLLRLALERSSSAQEALHVITGLLEHYGQGGNCLEDAAPFSYHSTFLLADRTEAWVLETAGRLWAAQRIQEGARNISNQLSIGTDISAQHPELRTHAQAKGWWDGQGAFDFAQIFSLTQQPVRMEAAKARFQAGRELLRQRQGGITAEVMMGILRDKESGICMDSGGFRTTASMVSVLPQDPTQPCVHFLTATPDPSRSVFKPFIFGVGVAQAPQVLSPTFGAQDPVRTLPRFQTQVDRRHTLYRGHQAALGLMERDQDRGQQLQQKQQDLEQEGLEATQGLLAGEWAPPLWELGSLFQAFVKRESQAYA

SEQ ID NO: 756 - protein, 87 aa, Homo sapiens
  SIGNAL -62..-1
MAIFWIVHAHFWSPLPPRLPHGRCCCLKAPLPPDVGPLQVAPHLFSVPLHILTVPLLEPARCSGILVFFLHQPVSSLSFCYFIGGWC

SEQ ID NO: 757 - protein, 149 aa, Homo sapiens
  SIGNAL -100..-1
METLYRVPFLVLECPNLKLKKPPWLHMPSAMTVYALVVVSYFLITGGIIYDVIVEPPSVGSMTDEHGHQRPVAFLAYRVNGQYIMEGLASSFLFTMGGLGFIILDRSNAPNIPKLNRFLLLFIGFVCVLLSFFMARVFMRMKLPGYLMG

SEQ ID NO: 758 - protein, 187 aa, Homo sapiens
  SIGNAL -35..-1
MANNTTSLGSPWPENFWEDLIMSFTVSMAIGLVLGGFIWAVFICLSRRRRASAPISQWSSSRRSRSSYTHGLNRTGFYRHSGCERRSNLSLASLTFQRQASLEQANSFPRKSSFRASTFHPFLQCPPLPVETESQLVTLPSSNISPTISTSHSLSRPDYWSSNSLRVGLSTPPPPAYESIIKAFPDS

SEQ ID NO: 759 - protein, 123 aa, Homo sapiens
  SIGNAL -26..-1
MATAAGATYFQRGSLFWFTVITLSFGYYTWVVFWPQSIPYQNLGPLGPFTQYLVDHHHTLLCNGYWLAWLIHVGESLYAIVLCKHKGITSGRAQLLWFLQTFFFGIASLTILIAYKRKRQKQT

SEQ ID NO: 760 - protein, 153 aa, Homo sapiens
  SIGNAL -102..-1
MAAGLFGLSARRLLAAAATRGLPAARVRWESSFSRTVVAPSAVAGKRPPEPTTPWQEDPEPEDENLYEKNPDSHGYDKDPVLDVWNMRLVFFFGVSIILVLGSTFVAYLPDYRMKEWSRREAERLVKYREANGLPIMESNCFDPSKIQLPEDE

SEQ ID NO: 761 - protein, 72 aa, Homo sapiens
LPVSTRIINHIYSFPSVDLWIVCIFTVSVSHLFEKGTLYGYFYVINSSINLCVNDCLPVMDSISLSPLFLSH

SEQ ID NO: 762 - protein, 175 aa, Homo sapiens
  SIGNAL -20..-1
MEKIPVSAFLLLVALSYTLARDTTVKPGAKKDTKDSRPKLPQTLSRGWGDQLIWTQTYEEALYKSKTSNKPLMIIHHLDECPHSQALKKVFAENKEIQKLAEQFVLLNLVYETTDKHLSPDGQYVPRIMFVDPSLTVRADITGRYSNRLYAYEPADTALLLDNMKKALKLLKTEL

SEQ ID NO: 763 - protein, 303 aa, Homo sapiens
  SIGNAL -20..-1
MADAASQVLLGSGLTILSQPLMYVKVLIQVGYEPLPPTIGRNIFGRQVCQLPGLFSYAQHIASIDGRRGLFTGLTPRLCSGVLGTVVHGKVLQHYQESDKGEELGPGNVQKEVSSSFDHVIKETTREMIARSAATLITHPFHVITLRSMVQFIGRESKYCGLCDSIITIYREEGILGFFAGLVPRLLGDILSLWLCNSLAYLVNTYALDSGVSTMNEMKSYSQAVTGFFASMLTYPFVLVSNLMAVNNCGLAGGCPPYSPIYTSWIDCWCMLQKEGNMSRGNSLFFRKVPFGKTYCCDLKMLI

SEQ ID NO: 764 - protein, 65 aa, Homo sapiens
  SIGNAL -39..-1
MSTGIMEYKKTTKAMKKKKDVLFTSYFKTIAFLLLYVSAGPISRIFIRSLELFLMFPSNKHWYIS

SEQ ID NO: 765 - protein, 137 aa, Homo sapiens
  SIGNAL -17..-1
MGFGATLAVGLTIFVLSVVTIIICFTCSCCCLYKTCRRPRPVVTTTTSTTVVHAPYPQPPSVPPSYPGPSYQGYHTMPPQPGMPAAPYPMQYPPPYPAQPMGPPAYHETLAGGAAAPYPASQPPYNPAYMDAPKAAL

SEQ ID NO: 766 - protein, 154 aa, Homo sapiens
  SIGNAL -13..-1
MALLLSVLRVLLGGFFALVGLAKLSEEISAPVSERMNALFVQFAEVFPLKVFGYQPDPLNYQIAVGFLELLAGLLLVMGPPMLQEISNLFLILLMMGAIFTLAALKESLSTCIPAIVCLGFLLLLNVGQLLAQTKKVVRPTRKKTLSTFKESWK

SEQ ID NO: 767 - protein, 103 aa, Homo sapiens
  SIGNAL -36..-1
MANLFIRKMVNPLLYLSRHTVKPRALSTFLFGSIRGAAPVAVEPGAAVRSLLSPGLLPHLLPALGFKNKTVLNKRCKDCYLVKRRGRWYVYCKTHPRHKQRQM

SEQ ID NO: 768 - protein, 86 aa, Homo sapiens
  SIGNAL -74..-1
MPYAFTSPCPCSFVSLPEISFYFTKLLLILKALPESPFLLASSPLPPLPTTLRKFIPPPSLISCTCLLLYLTHCILGICFAYPFIL

SEQ ID NO: 769 - protein, 395 aa, Homo sapiens [sequence omitted]

SEQ ID NO: 770 - protein, 93 aa, Homo sapiens
  SIGNAL -18..-1
MIHLGHILFLLLLPVAAAQTTPGERSSLPAFYPGTSGSCSGCGSLSLPLLAGLVAADAVASLLIVGAVFLCARPRRSPAQEYGKVYINMPGRG

SEQ ID NO: 771 - protein, 61 aa, Homo sapiens
  SIGNAL -21..-1
MREMPVPSLINLAASRTLSFCISDNHVSSPGPANPSCGLHPHWLRPLKLLTYTCRELKLQG

SEQ ID NO: 772 - protein, 331 aa, Homo sapiens
  SIGNAL -31..-1
MWLWEDQGGLLGPFSFLLLVLLLVTRSPVNACLLTGSLFVLLRVFSFEPVPSCRALQVLKPRDRISAIAHRGGSHDAPENTLAAIRQAAKNGATGVELDIEFTSDGIPVLMHDNTVDRTTDGTGRLCDLTFEQIRKLNPAANHRLRNDFPDEKIPTLMEAVAECLNHNLTIFFDVKGHAHKATEALKKMYMEFPQLYNNSVVCSFLPEVIYKMRQTDRDVITALTHRPWSLSHTGDGKPRYDTFWKHFIFVMMDILLDWSMHNILWYLCGISAFLMQKDFVSPAYLKKWSAKGIQVVGWTVNTFDEKSYYESHLGSSYITDSMVEDCEPHF

SEQ ID NO: 773 - protein, 210 aa, Homo sapiens
  SIGNAL -99..-1
MAASVEQREGTIQVQGQALFFREALPGSGQARFSVLLLHGIRFSSETWQNLGTLHRLAQAGYRAVAIDLPGLGHSKEAAAPAPIGELAPGSFLAAVVDALELGPPVVISPSLSGMYSLPFLTAPGSQLPGFVPVAPICTDKINAANYASVKTPALIVYGDQDPMGQTSFEHLKQLPNHRVLIMKGAGHPCYLDKPEEWHTGLLDFLQGLQ

SEQ ID NO: 774 - protein, 79 aa, Homo sapiens
  SIGNAL -67..-1
MELEAMSRYTSPVNPAVFPHLTVVLLAIGMFFTAWFFVYEVTSTKYTRDIYKELLISLVASLFMGFGVLFLLLWVGIYV

SEQ ID NO: 775 - protein, 84 aa, Homo sapiens
MAVWPEVSQNRLTRGLLLPNYQLRGSVPKREKRPKRKHQHLFTPSERHSVCLDCLLEISLSGKQWRNVISFNCFCTTKTLFWVN

SEQ ID NO: 776 - protein, 92 aa, Homo sapiens
  SIGNAL -20..-1
MASLGHILVFCVGLLTMAKAESPKEHDPFTYDYQSLQIGGLVIAGILFILGILIVLSRRCRCKFNQQQRTGEPDEEEGTFRSSIRRLSTRRR

SEQ ID NO: 777 - protein, 210 aa, Homo sapiens
  SIGNAL -14..-1
MLTLLGLSLILAGLIVGGACIYKHFMPKSTIYRGEMCFFDSEDPANSLRGGEPNFLPVTEEADIREDDNIAIIDVPVPSFSDSDPAAIIHDFEKGMTAYLDLLLGNCYLMPLNTSIVMPPENLVELFGKLASGRYLPQTYVVREDLVAVEEIRDVSNLGIFIYQLCNNRKSFRLRRRDLLLGFNKRAIDKCWKIRHFPNEFIVETKICQE

SEQ ID NO: 778 - protein, 205 aa, Homo sapiens
  SIGNAL -139..-1
MAPTRKDKLLQFYPSLEDPASSRYQNFSKGSRHGSEEAYIDPIAMEYYNWGRFSKPPEGEAKDKAGGGGSGVGAQGRSHTSRQERRLGLGSDDDANSYENVLICKQKTTETGAQQEDVGGLCRGDLSLSLALKTGPTSGLCPSASPEEDGESEDYQNSASIHQWRESRKVMGQLQREASPGPVGSPDEEDGEPDYVNGEVAATEA

SEQ ID NO: 779 - protein, 85 aa, Homo sapiens
  SIGNAL -17..-1
MKKVLLLITAILAVAVGFPVSQDQEREKRSISDSDELASGFFVFPYPYPFRPLPPIPFPRFPWFRRNFPIPIPESAPTTPLPSEK

SEQ ID NO: 780 - protein, 115 aa, Homo sapiens
  SIGNAL -51..-1
MQAQAPVVVVTQPGVGPGPAPQNSNWQTGMCDCFSDCGVCLCGTFCFPCLGCQVAADMNECCLCGTSVAMRTLYRTRYGIPGPICDDYMATLCCPHCTLCQIKRDINRRRAMRTF

SEQ ID NO: 781 - protein, 81 aa, Homo sapiens; identical to SEQ ID NO: 707
  SIGNAL -31..-1

SEQ ID NO: 782 - protein, 235 aa, Homo sapiens
  SIGNAL -39..-1
MGTADSDEMAPEAPQHTHIDVHIHQESALAKLLLTCCSALRPRATQARGSSRLLVASWVMQIVLGILSAVLGGFFYIRDYTLLVTSGAAIWTGAVAVLAGAAAFIYEKRGGTYWALLRTLLALAAFSTAIAALKLWNEDFRYGYSYYNSACRISSSSDWNTPAPTQSPEEVRRLHLCTSFMDMLKALFRTLQAMLLGVWILLLLASLAPLWLYCWRMFPTKGKRDQKEMLEVSGI

SEQ ID NO: 783 - protein, 62 aa, Homo sapiens
  SIGNAL -21..-1
MESRVLLRTFCLIFGLGAVWGLGVDPSLQIDVLTELELGESTTGVRQVPGLHNGTKAFLFQA

SEQ ID NO: 784 - protein, 11 aa, Homo sapiens
MGLSSSEGDIP

SEQ ID NO: 785 - protein, 56 aa, Homo sapiens
  SIGNAL -34..-1
MERGLKSADPRDGTGYTGWAGIAVLYLHLYDVFGDPASMFCKVFDLLVLNKILLGL

SEQ ID NO: 786 - protein, 99 aa, Homo sapiens
  SIGNAL -32..-1
  UNSURE -5,42,58: Xaa = any one of the twenty amino acids
MAAAAASRGVGAKLGLREIRIHLCQRSXGSQGVRDFIEKRYVELKKANPDLPILIRECSDVQPKLWARYAFGQXTNVPLNNFSADQVTRXLENVLSGKA

SEQ ID NO: 787 - protein, 160 aa, Homo sapiens
  SIGNAL -27..-1
  UNSURE 49,74,75,88,98,104,112,114,120: Xaa = any one of the twenty amino acids
MQRVSGLLSWTLSRVLWLSGLSEPGAARQPRIMEEKALEVYDLIRTIRDPEKPNTLEELEVVSESCVEVQEINEEXYLVIIRFTPTVPHCSLATLIGLCLXXKLQRCLPFKHKLXIYISEGTHSXEEDINXQINDKERXAXAMENPXLREIVEQCVLEPD

SEQ ID NO: 788 - protein, 59 aa, Homo sapiens
  SIGNAL -22..-1
MRLKYQHTGAVLDCAFYDPTHAWSGGLDHQLKMHDLNTDQENLVGTMMPLSDVLNTVHK

SEQ ID NO: 789 - protein, 112 aa, Homo sapiens
  SIGNAL -48..-1
  UNSURE 48: Xaa = any one of the twenty amino acids
MQDTGSVVPLHWFGFGYAALVASGGIIGYVKAGSVPSLAAGLLFGSLAGLGAYQLSQDPRNVWVFLATSGTLAGIMGMRFYHSGKFMPAGLIAGAXLLMVAKIGVSMFNRPH

SEQ ID NO: 790 - protein, 111 aa, Homo sapiens
  SIGNAL -56..-1
  UNSURE 27,28,43,44,49,50,52,53: Xaa = any one of the twenty amino acids
MGGNGSTCKPDTERQGTLSTAAPTTSPAPCLSNHHNKKHLILAFCAGVLLTLLLIAFIFLIIKSYRKYHSKPQAPDPHSDPPXXLSSIPGESLTYASTXXQTLRXXEXXLG

SEQ ID NO: 791 - protein, 144 aa, Homo sapiens
  SIGNAL -77..-1
  UNSURE -65,31,34: Xaa = any one of the twenty amino acids
MAASKVKQDMPPXGGYGPIDYKRNLPRRGLSGYSMLAIGIGTLIYGHWSIMKWNRERRRLQIEDFEARIALLPLLQAETDRRTLQMLRENLEEEAIIMKDVPDWKVGXSVXHTTRWVPPLIGELYGLRTTKEALHASHGFMWYT

SEQ ID NO: 792 - protein, 110 aa, Homo sapiens
  SIGNAL -18..-1
  UNSURE 48,52,55,59,65: Xaa = any one of the twenty amino acids
METGRLLSLSSLPLVLLGWEYSSQTLNLVPSTSILSFVPFIPLHLVLFALWYLPVPHHLYPQGLGXHAAXAEXGKRXEGGTQXALWLRVQPSCPSPVCLEPVPPRSRFLL

SEQ ID NO: 793 - protein, 79 aa, Homo sapiens; identical to SEQ ID NO: 774
  SIGNAL -36..-1

SEQ ID NO: 794 - protein, 196 aa, Homo sapiens
  SIGNAL -34..-1
  UNSURE 81,84,87,131,135,143,156: Xaa = any one of the twenty amino acids
MSFLQDPSFFTMGMWSIGAGALGAAALALLLANTDVFLSKPQKAALEYLEDIDLKTLEKEPRTFKAKELWEKNGAVIMAVRRPGCFLCREEAADLSSLKSMLDQLGVPLYAVVKXHIXTEXKDFQPYFKGEIFLDEKKKFYGPQRRKMMFMGFIRLGMWYNFFRXWNGXFSGNLEGXGFILGGIFVVGSXKAGHSS

SEQ ID NO: 795 - protein, 177 aa, Homo sapiens
  SIGNAL -18..-1
  UNSURE 32,91,98: Xaa = any one of the twenty amino acids
MLLCLLTPLFFMFPTGFSSPSPSAAAAAQEVRSATDGNTSTTPPTSAKKXKLNSSSSSSSNSSNEREDFDSTSSSSSTPPLQPRDSASPSTSSFCLGVSVAASSHVPIXKKLRFEXTLEFVGFDAKMAEESSSSSSSSSPTAATSQQQQLKNKSILNLFCGFGASCKRPSQIFYHRL

SEQ ID NO: 796 - protein, 105 aa, Homo sapiens
  SIGNAL -22..-1
MQGHWLSSAFALVWLWLRSTGCFWWDHWLCKSRQRAVPGCRAALWQSSRPGCLPAVSGSKERLGFPSYIWYLGWHYGNEVLPLWKIHACRFNCRCQFADGRQSWS

SEQ ID NO: 797 - protein, 148 aa, Homo sapiens
  SIGNAL -48..-1
  UNSURE 32,100: Xaa = any one of the twenty amino acids
MIAIYGKNFCVSAKNAFMLLMRNIVRVVVLDKVTDLLLFFGKLLVVGGVGVLSFFFFSGRIPGLGKDFKSPHLNYYWLPXMTSILGAYVIASGFFSVFGMCVDTLFLCFLEDLERTTAPWTALLHVQELLKILGKKNEAPPDNKKRKX

SEQ ID NO: 798 - protein, 259 aa, Homo sapiens
  SIGNAL -23..-1
  UNSURE 31,84,88,90,94,100,110,113,117,122,152,153,173,193,194: Xaa = any one of the twenty amino acids
MPSWIGAVILPLLGLLLSLPAGADVKARSCGEVRQAYGAKGFSLADIPYQEIAXEHLRICPQEYTCCTTEMEDKLSQQSKLEFENLVEETSHFVRTTFVSRHKKFDXFFRXLXENAXKSLNDXFVRTYGMLYXQNXEVFXDLFTXLKRYYTGGNVNLEEMLNDFWARLLERMFQXXNPQYHFSEDYLECVSKYTDXLKPFGDVPRKLKIQVTRAFXXARTFVQGLTVGREVANRVSKVIENVLSFSLVFLVYSVFKTNV

SEQ ID NO: 799 - protein, 111 aa, Homo sapiens
  SIGNAL -62..-1
  UNSURE 37,43: Xaa = any one of the twenty amino acids
MGESIPLAAPVPVEQAVLETFFSHLGIFSYDKAKDNVEKEREANKSAGGSWLSLLAALAHLAAAEKVYHSLTYLGQKLGTSAPPPEPLEEEVKGVYSPXGSGLGXPSLCHF

SEQ ID NO: 800 - protein, 311 aa, Homo sapiens
  SIGNAL -23..-1
  UNSURE 56,70,107,110,113,178,181,183,195,200,202,204,230,231,244: Xaa = any one of the twenty amino acids
MADVINVSVNLEAFSQAISAIQALRSSVSRVFDCLKDGMRNKETLEGREKAFIAHFQDNLHSVNRDLNELERLSNLVGXPSENHPLHNSGLLXLDPVQDKTPLYSQLLQAYKWSNKLQYHAGLASGLLNXQSXKRXANQMGVSAKRRPKAQPTTLVLPPQYVDDVISRIDRMFPEMSIHLSRPNGTSAMLLVTLGKVLKVXVVXRXLFIDRTIVKGYXENVYXEXGXLDIWSKSNYQVFQKVTDHATTALLHXXLPQMPDVVVRSFXTWLRSYIKLFQAPCQRCGKFLQDGLPPTWRDFRTLEAFHDTCRQ

SEQ ID NO: 801 - protein, 91 aa, Homo sapiens
  SIGNAL -60..-1
MTSLFAVVLQREKEPHLWLSSPHIRFSLRVNKLSELMLQLLQFKAFPSSLVPFFLFTCFGHFPSFTTFQGFIENNLLQNQFNSNVDIVACS

SEQ ID NO: 802 - protein, 287 aa, Homo sapiens
  SIGNAL -17..-1
  UNSURE 74: Xaa = any one of the twenty amino acids
MELERIVSAALLAFVQTHLPEADLSGLDEVIFSYVLGVLEDLGPSGPSEENFDMEAFTEMMEAYVPGFAHIPRGTIGDMMQKLSGQLSDAXNKENLQPQNSGVQGQVPISPEPLQRPEMLKEETRSSAAAAADTQDEATGAEEELLPGVDVLLEVFPTCSVEQAQWVLAKARGDLEEAVQMLVEGKEEGPAAWEGPNQDLPRRLRGPQKDELKSFILQKYMMVDSAEDQKIHRPMAPKEAPKKLIRYIDNQVVSTKGERFKDVRNPEAEEMKATYINLKPARKYRFH

SEQ ID NO: 803 - protein, 104 aa, Homo sapiens
  SIGNAL -49..-1
  UNSURE 4: Xaa = any one of the twenty amino acids
MEHLTHSSQKLQADEHLTKEVWSRLLKEKGPAGLILCFLCLYPIPLCTSHPVXLCAHPQDVYPVVVRAEIHAELYQELAYLKTETESLAHLFALVPQAKIKNRV

SEQ ID NO: 804 - protein, 84 aa, Homo sapiens
  SIGNAL -36..-1
  UNSURE -26,-25,-24: Xaa = any one of the twenty amino acids
MGLLTFGYIEXXXKTEHNPDHHSCLAVSWEAAGCHGAGTQQSPLGVAGPWRPRPPCVGSLLAARSLHKQVILFGLLGFAYDHAA

SEQ ID NO: 805 - protein, 131 aa, Homo sapiens
  SIGNAL -20..-1
  UNSURE 40,41,43,60,70,76,82,86,105,107: Xaa = any one of the twenty amino acids
MEKIPVSAFLLLVALSYTLARDTTVKPGAKKDTKDSRPKLPQTLSRGWGDQLIWTQTYEXXLXKSKTSNKPLMIIHHLDXCPHSQALKKXFAENKXIQKLAXQFVXLNLVYETTDKHLSPDGQYXPXDYVC

SEQ ID NO: 806 - protein, 131 aa, Homo sapiens
  SIGNAL -23..-1
  UNSURE 59,69,78,85,87: Xaa = any one of the twenty amino acids
MMNFRQRMGWIGVGLYLLASAAAFYYVFEISETYNRLALEHIQQHPGEPLEGTTWTHSLKAQLLSLPFWVWTVIFLVPYLQXFLFLYSCTKXDPKTVGYCXIPICLAXIXNRHQDFVKASNQISKLQLIDT

SEQ ID NO: 807 - protein, 335 aa, Homo sapiens
  SIGNAL -16..-1
  UNSURE 70,139,141,154,156,165: Xaa = any one of the twenty amino acids
MAVFVVLLALVAGVLGNEFSILKSPGSVVFRNGNWPIPGERIPDVAALSMGFSVKEDLSWPGLAVGNLFHRPRASVMVMVKGVNNXPLPPGCVISYPLENAVPFSLDSVANSIHSLFSEETPVVLQLAPSEERVYMVGKANSVWKTFQSLAPAPXIXCFKKTLFSVHSPXIXLSRNNEVDXLFLSELQVLHDISSLLSRHKHLAKDHSPDLYSLELAGLDEIGKRYGEDSEQFRDASKILVDALQKFADDMYSLYGGNAVVELVTVKSFDTSLIRKTRTILEAKQAKNPASPYNLAYKYNFEYSVVFNMVLWIMIALALAVIITSYNIWNMESWI

SEQ ID NO: 808 - protein, 84 aa, Homo sapiens
  SIGNAL -55..-1
MRKVVLITGASSGIGLALCKRLLAEDDELHLCLACRNMSKAEAVCAALLASHPTAEVTIVQVDVSNLQSFFRASKELKQRMISC

SEQ ID NO: 809 - protein, 280 aa, Homo sapiens
  SIGNAL -18..-1
MEGPRGWLVLCVLAISLASMVTEDLCRAPDGKKGEAGRPGRRGRPGLKGEQGEPGAPGIRTGIQGLKGDQGEPGPSGNPGKVGYPGPSGPLGARGIPGIKGTKGSPGNIKDQPRPAFSAIRRNPPMGGNVVIFDTVITNQEEPYQNHSGRFVCTVPATTTSPSRCCPSGKSACPSSPPQGARSDAPWASVTPPTRGSSRWCQGAWCFSCSRVTRSGLKKTPKRVTFTRALRPTASSAASSSSHLPEPGKDPLPHPPLWLPCSACKMGALLLQLLKGGGWL

SEQ ID NO: 810 - protein, 140 aa, Homo sapiens
  SIGNAL -51..-1
  UNSURE 24,25,29,87: Xaa = any one of the twenty amino acids
MRKDPSGAGLWLHSGGPVLPYVRESVRRNPASAATPSTAVGLFPAPTECFARVSCSGVEALGRRDWLGGGPRAHXXATEXSAPKESLGCHDCHAIKKCRKWEVFRMTHQVLFPRVWALSWNPLACTPSCLQRCTCIPXCS

What is claimed is:

1. An isolated polynucleotide, comprising a nucleic acid sequence selected from the group consisting of:
a) a polynucleotide of any one of SEQ ID NOs: 1-405, or of a human cDNA of a deposited clone, encoding at least any single integer from 6 to 500 amino acids of any one of SEQ ID NOs: 406-810,
b) a polynucleotide of any one of SEQ ID NOs: 1-405, or of a human cDNA of a deposited clone, encoding the signal peptide sequence of any one of SEQ ID NOs: 406-810,
c) a polynucleotide of any one of SEQ ID NOs: 1-405, or of a human cDNA of a deposited clone, encoding a mature polypeptide sequence of any one of SEQ ID NOs: 406-810,
d) a polynucleotide of any one of SEQ ID NOs: 1-405, or of a human cDNA of a deposited clone, encoding a full length polypeptide sequence of any one of SEQ ID NOs: 406-810,
e) a polynucleotide of any one of SEQ ID NOs: 1-405, or of a human cDNA of a deposited clone, encoding a polypeptide sequence of a biologically active fragment of any one of SEQ ID NOs: 406-810,
f) a polynucleotide encoding a polypeptide sequence of at least any single integer from 6 to 500 amino acids of any one of SEQ ID NOs: 406-810 or of a polypeptide encoded by a human cDNA of a deposited clone,
g) a polynucleotide encoding a polypeptide sequence of a signal peptide of any one of SEQ ID NOs: 406-810 or of a signal peptide encoded by a human cDNA of a deposited clone,
h) a polynucleotide encoding a polypeptide sequence of a mature polypeptide of any one of SEQ ID NOs: 406-810 or of a mature polypeptide encoded by a human cDNA of a deposited clone,
i) a polynucleotide encoding a polypeptide sequence of a full length polypeptide of any one of SEQ ID NOs: 406-810 or of a mature polypeptide encoded by a human cDNA of a deposited clone,
j) a polynucleotide encoding a polypeptide sequence of a biologically polypeptide of any one of SEQ ID NOs: 406-810, or of a biologically polypeptide encoded by a human cDNA of a deposited clone,
k) a polynucleotide of any one of a) through j) further comprising an expression vector,
l) a host cell recombinant for a polynucleotide of a) through k) above,
m) a non-human transgenic animal comprising the host cell of k),
n) a polynucleotide of a) through j) further comprising a physiologically acceptable carrier.

2. A polypeptide comprising an amino acid sequence selected from the group consisting of:
a) any single integer from 6 to 500 amino acids of any one of SEQ ID NOs: 406-810 or of a polypeptide encoded by a human cDNA of a deposited clone;
b) a signal peptide sequence of any one of SEQ ID NOs: 406-810 or encoded by a human cDNA of a deposited clone;
c) a mature polypeptide sequence of any one of SEQ ID NOs: 406-810 or encoded by a human cDNA of a deposited clone;
d) a full length polypeptide sequence of any one of SEQ ID NOs: 406-810 or encoded by a human cDNA of a deposited clone;
e) a polypeptide of a) through d) further comprising a physiologically acceptable carrier.

3. A method of making a polypeptide, said method comprising
a) providing a population of host cells comprising the polynucleotide of claim 1;
b) culturing said population of host cells under conditions conducive to the production of a polypeptide of claim 2 within said host cells; and
c) purifying said polypeptide from said population of host cells.

4. A method of making a polypeptide, said method comprising:
a) providing a population of cells comprising a polynucleotide encoding the polypeptide of claim 2, operably linked to a promoter;
b) culturing said population of cells under conditions conducive to the production of said polypeptide within said cells; and
c) purifying said polypeptide from said population of cells.

5. An antibody that specifically binds to the polypeptide of claim 2.

6. A method of binding a polypeptide of claim 2 to an antibody of claim 5, comprising contacting said antibody with said polypeptide under conditions in which antibody can specifically bind to said polypeptide.

7. A method of determining whether a GENSET gene is expressed within a mammal, said method comprising the steps of:
a) providing a biological sample from said mammal
b) contacting said biological sample with either of:
i) a polynucleotide that hybridizes under stringent conditions to the polynucleotide of claim 1; or
ii) a polypeptide that specifically binds to the polypeptide of claim 2; and
c) detecting the presence or absence of hybridization between said polynucleotide and an RNA species within said sample, or the presence or absence of binding of said polypeptide to a protein within said sample;
wherein a detection of said hybridization or of said binding indicates that said GENSET gene is expressed within said mammal.

8. The method of claim 7, wherein said polynucleotide is a primer, and wherein said hybridization is detected by detecting the presence of an amplification product comprising the sequence of said primer.

9. The method of claim 7, wherein said polypeptide is an antibody.

10. A method of determining whether a mammal has an elevated or reduced level of GENSET gene expression, said method comprising the steps of:
a) providing a biological sample from said mammal; and
b) comparing the amount of the polypeptide of claim 2, or of an RNA species encoding said polypeptide, within said biological sample with a level detected in or expected from a control sample;
wherein an increased amount of said polypeptide or said RNA species within said biological sample compared to said level detected in or expected from said control sample indicates that said mammal has an elevated level of said GENSET gene expression, and wherein a decreased amount of said polypeptide or said RNA species within said biological sample compared to said level detected in or expected from said control sample indicates that said mammal has a reduced level of said GENSET gene expression.

11. A method of identifying a candidate modulator of a GENSET polypeptide, said method comprising:
a) contacting the polypeptide of claim 2 with a test compound; and
b) determining whether said compound specifically binds to said polypeptide;
wherein a detection that said compound specifically binds to said polypeptide indicates that said compound is a candidate modulator of said GENSET polypeptide.

12. The method of claim 11, further comprising testing the biological activity of said GENSET polypeptide in the presence of said candidate modulator, wherein an alteration in the biological activity of said GENSET polypeptide in the presence of said compound in comparison to the activity in the absence of said compound indicates that the compound is a modulator of said GENSET polypeptide.

13. A method for the production of a pharmaceutical composition comprising
a) identifying a modulator of a GENSET polypeptide using the method of claim 11; and
b) combining said modulator with a physiologically acceptable carrier.
